(19) United States
(12) Patent Application Publication
(10) Pub. No.: US 2010/0016173 A1
(43) Pub. Date: Jan. 21, 2010

(54) MATERNAL SERUM BIOMARKERS FOR DETECTION OF PRE-ECLAMPSIA

(75) Inventors: SRINIVASA R. NAGALLA, HILLSBORO, OR (US); JUHA RASANEN, OULU (FI); MICHAEL GRAVETT, SEATTLE, WA (US)

Correspondence Address: Goodwin Procter LLP;Attn: Patent Administrator, 135 Commonwealth Drive, Menlo Park, CA, 94025-1105, US

(73) Assignee: PROTEOGENIX, INC., COSTA MESA, CA (US)

(21) Appl. No.: 12/363,659

(22) Filed: Jan. 30, 2009

Related U.S. Application Data
(60) Provisional application No. 61/024,859, filed on Jan. 30, 2008.

(51) Int. Cl. G01N 33/53; C12Q 1/02; C40B 30/04

(52) U.S. Cl. 506/9; 435/29; 435/7.1

(57) ABSTRACT

The present invention concerns the identification and detection of maternal serum biomarkers of pre-eclampsia and associated complications, gestational hypertension and placental insufficiency using global proteomic approaches. The invention further concerns the identification of maternal serum biomarkers for detection of pre-eclampsia and associated complications, gestational hypertension and placental insufficiency during early gestation.

### RELATED APPLICATION

[0001] This application claims priority under 35 U.S.C. § 119(e) to U.S. provisional application No. 61/024,859, filed Jan. 30, 2008, the entire contents of which are incorporated herein by reference.

### BACKGROUND OF THE INVENTION

[0002] 1. Field of the Invention

[0003] The present invention concerns the identification and detection of maternal serum biomarkers of pre-eclampsia using global proteomic approaches. The invention further concerns the identification of maternal serum biomarkers for detection of pre-eclampsia during early gestation.

[0004] 2. Description of the Related Art

[0005] Preeclampsia, a transient disorder unique to pregnancy, affects 5% to 10% of pregnant women (Solomon, 2006). It is a major cause of maternal morbidity and mortality worldwide, and is also associated with a five-fold increase in perinatal mortality (Solomon, 2006; Roberts, 2003). Importantly, it is unpredictable in onset and disease progression, and is cured only by delivery.

[0006] Preeclampsia is defined as new onset hypertension and proteinuria after 20 weeks gestation in a previously normotensive pregnant woman and can be mild or severe. Patients with mild disease have blood pressures >140/90 and proteinuria with >300 mg protein noted on a 24 hour urine noted after 20 weeks gestation and usually deliver near term without significant co-morbidities. However, about 25% of preeclampsia is severe, characterized by symptoms of central nervous system dysfunction, hepatocellular injury, reduced urine output, and markedly elevated blood pressure (systolic>160 mmHg or diastolic>110 mmHg). Severe preeclampsia occurs frequently in the late second and early third trimester, and is associated with marked increases in both maternal and perinatal morbidity and mortality. Two severe complications of preeclampsia are 1) HELLP syndrome characterized by hemolysis, elevated liver enzymes, and low platelets and 2) eclampsia—characterized by the development of seizures. Both of these conditions are rare occurrences but are associated with poor prognosis (Solomon, 2006)

[0007] There are multiple risk factors associated with preeclampsia.[2, 3] These include nulliparity, history of preeclampsia in prior pregnancy, extremes in age (<18 years and >40 years), family history of preeclampsia, chronic hypertension, chronic renal disease, antiphospholipid antibody syndrome or inherited thrombophilia, vascular or connective tissue disease, diabetes mellitus, multiple gestation, obesity, male partner whose previous partner had preeclampsia, hydrops fetalis and unexplained fetal intrauterine growth restriction. However, preeclampsia is primarily a disorder of otherwise healthy young women during their first pregnancy. More than 50% of cases occur among these otherwise young, low risk, nulliparous patients

[0008] Unfortunately, the pathophysiology of preeclampsia is unclear and the diagnosis based entirely upon clinical criteria (Roberts, 2003). Recent data suggests that events leading to preeclampsia may begin as silently as early as the first trimester. Unfortunately, there are no clinically useful screening tests to predict the development of preeclampsia (Conde-Agudelo, 2004). Recent reports suggest that an imbalance of vasoactive placental peptides may be useful in the early prediction of preeclampsia.

[0009] These peptides include soluble fms-like tyrosine kinase-1 (sFlt-1) (Maynard, 2003), endoglin (Levine, 2006), placental growth factor and vascular endothelial growth factor (Polliotti 2003). Soluble fms-like tyrosine kinase-1 (sFlt-1) and endoglin are both antiangiogenic peptides and are produced in excess 2-3 months prior to development of preeclampsia (Maynard, 2003; Levine, 2006). In contrast, placental growth factor and vascular endothelial growth factor promote angiogenesis. Both have been shown to be significantly lower in second trimester maternal sera of women who subsequently develop severe pre-eclampsia (Polliotti 2003). Taken together, these observations suggest that preeclampsia is preceded by abnormal placentation and early invasion of maternal uterine spiral arteries that begins in the first trimester. More recently, we have utilized proteomic analysis to characterize 9 peptides, including acute phase reactants and vasoactive peptides, differentially expressed in the first trimester among women who subsequently develop preeclampsia when compared to women who do not (Rasanen, 2006). Ultimately these vascular perturbations lead to oxidative damage to the endothelium of small arterioles, leading to hypertension and multi-organ dysfunction. Early recognition of these peptides in the first trimester, before extensive endothelial damage may allow for early intervention and prevention trials.

[0010] The only cure for preeclampsia is delivery of the baby and placenta. Disease progression follows no predictable pattern; therefore, beyond 37 weeks of gestation (term), delivery is warranted. At gestational ages of less than 34 weeks, treatment of hypertension, and close fetal surveillance may prevent cerebral vascular accidents and prolong the pregnancy, but do not treat the underlying disease process. Delivery is still warranted for development of severe preeclampsia or eclampsia (Sibai, 2007). During labor, women with preeclampsia are at risk for development of eclampsia. The MAGPIE study demonstrated that administration of magnesium sulphate to women with pre-eclampsia reduces the risk of an eclamptic seizure (Altman, 2002). This risk is reduced from 4-7% to less than 1% with the use of IV magnesium sulfate. Magnesium sulfate is typically bolused with 4 grams IV followed by a continuous infusion of 2 grams per hour throughout labor and 24 hours postpartum (44% of eclampsia occurs postpartum) to reduce the risk of seizures.

[0011] Since the only treatment for preeclampsia is delivery, screening and prevention strategies prior to the onset of disease would be beneficial. Unfortunately, there is no preventative therapy for preeclampsia (Sibai, 2007). Because the pathophysiology ultimately leads to oxidative endothelial damage and microvascular coagulopathy, studies have utilized a variety of antioxidant therapy (Chappell, 1999; Rumbold 2005; Rumbold, 2006), antiplatelet therapy (Duley, 2007), or calcium supplementation (Vilar, 2006) to reduce the risks of preeclampsia among high risk women. Unfortunately, these treatments, generally begun in the second trimester, have resulted in either no, or only very modest reduction, in subsequent development of preeclampsia. This may be attributable to delayed screening of high risk women (because of inadequate screening tests) or delayed treatment for a process that began weeks earlier, in the first trimester. This points to the need for reliable screening test in the first trimester that will allow earlier, and potentially more efficacious, treatment and prevention strategies. Reductions in the risk of preeclampsia and its associated morbidities may well depend upon earlier identification of patients at risk.

### SUMMARY OF THE INVENTION

[0012] In one aspect, the invention provides a method for the diagnosis of active pre-eclampsia and associated complications in a pregnant female mammalian subject comprising testing in a maternal serum sample obtained from said subject the level of two or more proteins selected from the group consisting of apolipoprotein C-III (P02656), choriogonadotropin subunit beta (P1233), cystatin-C (P01034), endoglin (P17813), fibronectin (Q8IVI8), matrix metalloproteinase-9 (P14780), and pappalysin-2 (Q9BXP8), relative to the level in normal maternal serum or maternal serum known to be indicative of pre-eclampsia; and diagnosing said subject with pre-eclampsia if said level is determined to show a statistically significant difference relative to the level in said normal maternal serum, or is determined not to show a statistically significant difference relative to the level in said maternal serum known to be indicative of pre-eclampsia. In certain embodiments, the complications include small for gestational age and/or HELLP syndrome.

[0013] In one embodiment, the subject is a human patient.

[0014] In some embodiments, the methods comprising testing the abundance of at least three, at least four or all of said proteins, in any combination.

[0015] In one embodiment, the methods comprise testing the level of proteins fibronectin (Q8IVI8), choriogonadotropin subunit beta (P1233), matrix metalloproteinase-9 (P14780) and pappalysin-2 (Q9BXP8), and diagnosing said subject with pre-eclampsia, if two or more of said tested proteins shows a statistically significant difference in the maternal serum sample relative to normal maternal serum. In certain embodiments, the diagnosis of a subject with preeclampsia is made if all of said tested proteins show a statistically significant difference in the maternal serum sample relative to normal maternal serum.

[0016] In certain embodiments, level is determined by an immunoassay, by mass spectrometry, and/or by using a protein array.

[0017] In yet another aspect, the invention provides an immunoassay kit comprising antibodies and reagents for the detection of one or more proteins selected from the group consisting of alpha-1B-glycoprotein (P04217), actin (P62736), apolipoprotein B-100 (Q13787), apolipoprotein C-II (P02655), apolipoprotein C-III (P02656), C4b-binding protein beta chain (P20851), cathepsin D (P07339), choriogonadotropin subunit beta (P1233), cholinesterase (P06276), chorionic somatomammotropin hormone (P01243), cystatin-C (P01034), endoglin (P17813), coagulation factor XI (P03951), coagulation factor VII (P08709), fibronectin (Q8IVI8), filamin-A (P21333), heparin cofactor 2 (P05546), hepatocyte growth factor-like protein (P26927), histidine-rich glycoprotein (P04196), insulin-like growth factor-binding protein 2 (P18065), laminin subunit beta-1 (P07942), lipopolysaccharide-binding protein (P18428), matrix metalloproteinase-9 (P14780), pappalysin-2 (Q9BXP8), plastin-2 (P13796), profiling-1 (P07737), pregnancy-specific bet-1-glycoprotein (P11464), receptor-type tyrosine-protein phosphatase gamma (P23470), pregnancy zone protein (P20742), plasma retinol-binding protein (P02753), SH3 domain-binding glutamic acid-rich-like protein 3 (Q9H299), trangelin-2 (P37802), talin-1 (Q9Y490), tropomyosin alpha-4-chain (P67936), vasorin (Q6EMK4), vascular endothelial growth factor receptor 3 (P35916), vinculin (P18206), von Willebrand factor (P04275).

[0018] In one aspect, the invention provides an immunoassay kit comprising antibodies and reagents for the detection of one or more proteins selected from the group consisting of cystatin-C (P01034), endoglin (P17813), fibronectin (Q8IVI8), apolipoprotein C-III (P02656), choriogonadotropin subunit beta (P1233) and pappalysin-2 (Q9BXP8). In one embodiment, the kit includes antibodies and reagents for the detection of all of said proteins.

[0019] In another aspect, the invention provides an immunoassay kit comprising antibodies and reagents for the detection of one or more proteins selected from the group consisting of cystatin-C (P01034), endoglin (P17813), fibronectin (Q8IVI8), apolipoprotein C-III (P02656), and pappalysin-2 (Q9BXP8). In one embodiment, the kit includes antibodies and reagents for the detection of all of said proteins.

[0020] In yet another aspect, the invention provides an immunoassay kit comprising antibodies and reagents for the detection of one or more proteins selected from the group consisting of fibronectin (Q8IVI8), pappalysin-2 (Q9BXP8), and matrix metalloproteinase-9 (P14780). In one embodiment, the kit includes antibodies and reagents for the detection of all of said proteins.

[0021] In still another aspect, the invention provides a report comprising the results of and/or diagnosis based on a test comprising testing in a maternal serum sample obtained from said subject the level of two or more proteins selected from the group consisting of apolipoprotein C-III (P02656), choriogonadotropin subunit beta (P1233), cystatin-C (P01034), endoglin (P17813), fibronectin (Q8IVI8), matrix metalloproteinase-9 (P14780), and pappalysin-2 (Q9BXP8), relative to the level in normal maternal serum or maternal serum known to be indicative of pre-eclampsia; and diagnosing said subject with pre-eclampsia if said level is determined to show a statistically significant difference relative to the level in said normal maternal serum, or is determined not to show a statistically significant difference relative to the level in said maternal serum known to be indicative of pre-eclampsia.

[0022] In yet another aspect, the invention provides a tangible medium storing the results of and/or diagnosis based on a test comprising testing in a maternal serum sample obtained from said subject the level of two or more proteins selected from the group consisting of apolipoprotein C-III (P02656), choriogonadotropin subunit beta (P1233), cystatin-C (P01034), endoglin (P17813), fibronectin (Q8IVI8), matrix metalloproteinase-9 (P14780), and pappalysin-2 (Q9BXP8), relative to the level in normal maternal serum or maternal serum known to be indicative of pre-eclampsia; and diagnosing said subject with pre-eclampsia if said level is determined to show a statistically significant difference relative to the level in said normal maternal serum, or is determined not to show a statistically significant difference relative to the level in said maternal serum known to be indicative of pre-eclampsia.

[0023] In one other aspect, the invention provides a method for the diagnosis of pre-eclampsia in a female mammalian subject in early gestation comprising: testing in a maternal serum sample obtained from said subject the level of two or more proteins selected from the group consisting of alpha-2-antiplasmin (P08697), actin (P60709), afamin (P43652), antithrombin-III (P01008), apolipoprotein-A-II (P02652), attractin (Q9NTQ4), beta-2-microglobulin (P61769), transforming growth factor-beta-induced protein ig-h3 (Q15582), C4b-binding protein alpha chain (P04003), cathepsin D (P07339), carboxypeptidase B2 (Q961Y4), complement factor D (P00746), cartilage acidic protein 1 (Q9NQ79), dopamine beta-hydroxylase (P09172), coagulation factor XIII B chain (P05160), fibrinogen alpha chain (P02671), fibronectin (Q8IVI8), filamin A (P21333), Rho GDP-dissociation inhibitor 2 (P52566), platelet glycoprotein-1b alpha chain (P07359), haptoglobin-related protein (P00739), lipopolysaccharide-binding protein (P18418), plasma retinol-binding protein (P02753), platelet basic protein (P02775), transgelin-2 (P37802), tubulin beta-1 chain (Q9H4B7), talin-1 (Q9Y490), thymosin beta-4 (P62328), vasorin (Q6EMK4), vascular cell adhesion protein-1 (P19320), von Willebrand factor (P04275), zinc-alpha-2-glycoprotein (P25311), alpha-2-macroglobulin (P01023), apolipoprotein B-100 (Q13787), apolipoprotein C-III (P02656), choriogonadotropin subunit beta (P01233), chorionic somatomammotropin hormone (P01243), cystatin-C (P01034), endoglin (P17813), matrix metalloproteinase-9 (P14780), pappalysin-1 (Q13219), pregnancy-specific beta-1-glycoprotein 1 (Q9P1W5), vascular endothelial growth factor receptor 3 (P35916), C-reactive protein (P02741), serum amyloid P-component (P02743), membrane copper amine oxidase (Q16853), and catalase (P04040), relative to the level in normal maternal serum or maternal serum known to be indicative of pre-eclampsia; and diagnosing said subject with pre-eclampsia if said level shows a statistically significant difference relative to the level in said normal maternal serum, or does not show a statistically significant difference relative to the level in said maternal serum known to be indicative of pre-eclampsia.

[0024] In one embodiment, the subject is a human patient.

[0025] In certain embodiments, the subject is about 9 to about 11 weeks gestation. In other embodiments, the subject is about 10 to about 14 weeks gestation. In one embodiment, the pre-eclampsia is severe pre-eclampsia.

[0026] In other embodiments, the methods include testing the level of at least three, at least four, at least five, at least six, etc. of the listed proteins, in any combination.

[0027] In certain embodiments, the methods include testing the level of proteins complement factor D (P00746), vascular cell adhesion protein-1 (P19320), pappalysin-1 (Q13219), endoglin (P17813), plasma retinol-binding protein (P02753), and choriogonadotropin subunit beta (P01233). In certain other embodiments, the methods include testing the level of proteins membrane copper amine oxidase (Q16853), C-reactive protein (P02741), Serum amyloid P-component (P02743), catalase, tubulin beta, plasma retinol binding protein, lipopolysaccharide binding protein, and chorionic somatomammotropin. In yet other embodiments, the methods include testing the level of proteins pappalysin-1 (SEQ ID NO: 63), vascular cell adhesion protein 1 (SEQ ID NO: 60), beta-2-microglobulin (SEQ ID NO: 45), and cystatin C (SEQ ID NO: 11). In still other embodiments, the methods include testing the level of proteins C-reactive protein (P02741), vascular cell adhesion protein-1 (P19320), pappalysin-1 (Q13219), beta-2-microglobulin (P61769), and plasma retinol-binding protein (P02753).

[0028] In certain embodiments, level is determined by an immunoassay, by mass spectrometry, and/or by using a protein array.

[0029] In one aspect, the invention further includes an immunoassay kit comprising antibodies and reagents for the detection of two or more proteins selected from the group consisting of alpha-2-antiplasmin (P08697), actin (P60709), afamin (P43652), antithrombin-III (P01008), apolipoprotein-A-II (P02652), attractin (Q9NTQ4), beta-2-microglobulin (P61769), transforming growth factor-beta-induced protein ig-h3 (Q15582), C4b-binding protein alpha chain (P04003), cathepsin D (P07339), carboxypeptidase B2 (Q961Y4), complement factor D (P00746), cartilage acidic protein 1 (Q9NQ79), dopamine beta-hydroxylase (P09172), coagulation factor XIII B chain (P05160), fibrinogen alpha chain (P02671), fibronectin (Q8IVI8), filamin A (P21333), Rho GDP-dissociation inhibitor 2 (P52566), platelet glycoprotein-1b alpha chain (P07359), haptoglobin-related protein (P00739), lipopolysaccharide-binding protein (P18418), plasma retinol-binding protein (P02753), platelet basic protein (P02775), transgelin-2 (P37802), tubulin beta-1 chain (Q9H4B7), talin-1 (Q9Y490), thymosin beta-4 (P62328), vasorin (Q6EMK4), vascular cell adhesion protein-1 (P19320), von Willebrand factor (P04275), zinc-alpha-2-glycoprotein (P25311), alpha-2-macroglobulin (P01023), apolipoprotein B-100 (Q13787), apolipoprotein C-III (P02656), choriogonadotropin subunit beta (P01233), chorionic somatomammotropin hormone (P01243), cystatin-C (P01034), endoglin (P17813), matrix metalloproteinase-9 (P14780), pappalysin-1 (Q13219), pregnancy-specific beta-1-glycoprotein 1 (Q9P1W5), vascular endothelial growth factor receptor 3 (P35916), C-reactive protein (P02741), serum amyloid P-component (P02743), membrane copper amine oxidase (Q16853), and catalase (P04040).

[0030] In another aspect, the invention includes an immunoassay kit comprising antibodies and reagents for the detection of two or more proteins selected from the group consisting of complement factor D (P00746), vascular cell adhesion protein-1 (P19320), and pappalysin-1 (Q13219). In one embodiment, the kit includes antibodies and reagents for the detection of all of said proteins.

[0031] In yet another aspect, the invention provides an immunoassay kit comprising antibodies and reagents for the detection of two or more proteins selected from the group consisting of complement factor D (P00746), vascular cell adhesion protein-1 (P19320), pappalysin-1 (Q13219), endoglin (P17813), choriogonadoropin subunit beta (P01233) and plasma retinol-binding protein (P02753). In one embodiment, the kit includes antibodies and reagents for the detection of all of said proteins.

[0032] In still another aspect, the invention provides an immunoassay kit comprising antibodies and reagents for the detection of two or more proteins selected from the group consisting of pappalysin-1 (Q13219), C-reactive protein (P02741), plasma retinol-binding protein (P02753), beta-2-microglobulin (P61769) and vascular cell adhesion protein 1 (P19320). In one embodiment, the kit includes antibodies and reagents for the detection of all of said proteins.

[0033] In another aspect, the invention provides a report comprising the results of and/or diagnosis based on a test comprising testing in a maternal serum sample obtained from said subject the level of two or more proteins selected from the group consisting of alpha-2-antiplasmin (P08697), actin (P60709), afamin (P43652), antithrombin-III (P01008), apolipoprotein-A-II (P02652), attractin (Q9NTQ4), beta-2-microglobulin (P61769), transforming growth factor-beta-induced protein ig-h3 (Q15582), C4b-binding protein alpha chain (P04003), cathepsin D (P07339), carboxypeptidase B2 (Q961Y4), complement factor D (P00746), cartilage acidic protein 1 (Q9NQ79), dopamine beta-hydroxylase (P09172), coagulation factor XIII B chain (P05160), fibrinogen alpha chain (P02671), fibronectin (Q8IVI8), filamin A (P21333), Rho GDP-dissociation inhibitor 2 (P52566), platelet glycoprotein-1b alpha chain (P07359), haptoglobin-related protein (P00739), lipopolysaccharide-binding protein (P18418), plasma retinol-binding protein (P02753), platelet basic protein (P02775), transgelin-2 (P37802), tubulin beta-1 chain (Q9H4B7), talin-1 (Q9Y490), thymosin beta-4 (P62328), vasorin (Q6EMK4), vascular cell adhesion protein-1 (P19320), von Willebrand factor (P04275), zinc-alpha-2-glycoprotein (P25311), alpha-2-macroglobulin (P01023), apolipoprotein B-100 (Q13787), apolipoprotein C-III (P02656), choriogonadotropin subunit beta (P01233), chorionic somatomammotropin hormone (P01243), cystatin-C (P01034), endoglin (P17813), matrix metalloproteinase-9 (P14780), pappalysin-1 (Q13219), pregnancy-specific beta-1-glycoprotein 1 (Q9P1W5), vascular endothelial growth factor receptor 3 (P35916), C-reactive protein (P02741), serum amyloid P-component (P02743), membrane copper amine oxidase (Q16853), and catalase (P04040), relative to the level in normal maternal serum or maternal serum known to be indicative of pre-eclampsia; and diagnosing said subject with pre-eclampsia if said level shows a statistically significant difference relative to the level in said normal maternal serum, or does not show a statistically significant difference relative to the level in said maternal serum known to be indicative of pre-eclampsia.

[0034] In still another aspect, the invention provides a tangible medium storing the results of and/or diagnosis based on a test comprising testing in a maternal serum sample obtained from said subject the level of two or more proteins selected from the group consisting of alpha-2-antiplasmin (P08697), actin (P60709), afamin (P43652), antithrombin-III (P01008), apolipoprotein-A-II (P02652), attractin (Q9NTQ4), beta-2-microglobulin (P61769), transforming growth factor-beta-induced protein ig-h3 (Q15582), C4b-binding protein alpha chain (P04003), cathepsin D (P07339), carboxypeptidase B2 (Q961Y4), complement factor D (P00746), cartilage acidic protein 1 (Q9NQ79), dopamine beta-hydroxylase (P09172), coagulation factor XIII B chain (P05160), fibrinogen alpha chain (P02671), fibronectin (Q8IVI8), filamin A (P21333), Rho GDP-dissociation inhibitor 2 (P52566), platelet glycoprotein-1b alpha chain (P07359), haptoglobin-related protein (P00739), lipopolysaccharide-binding protein (P18418), plasma retinol-binding protein (P02753), platelet basic protein (P02775), transgelin-2 (P37802), tubulin beta-1 chain (Q9H4B7), talin-1 (Q9Y490), thymosin beta-4 (P62328), vasorin (Q6EMK4), vascular cell adhesion protein-1 (P19320), von Willebrand factor (P04275), zinc-alpha-2-glycoprotein (P25311), alpha-2-macroglobulin (P01023), apolipoprotein B-100 (Q13787), apolipoprotein C-III (P02656), choriogonadotropin subunit beta (P01233), chorionic somatomammotropin hormone (P01243), cystatin-C (P01034), endoglin (P17813), matrix metalloproteinase-9 (P14780), pappalysin-1 (Q13219), pregnancy-specific beta-1-glycoprotein 1 (Q9P1W5), vascular endothelial growth factor receptor 3 (P35916), C-reactive protein (P02741), serum amyloid P-component (P02743), membrane copper amine oxidase (Q16853), and catalase (P04040), relative to the level in normal maternal serum or maternal serum known to be indicative of pre-eclampsia; and diagnosing said subject with pre-eclampsia if said level shows a statistically significant difference relative to the level in said normal maternal serum, or does not show a statistically significant difference relative to the level in said maternal serum known to be indicative of pre-eclampsia.

[0035] In one aspect, the invention further provides a method for the diagnosis of gestational hypertension in a pregnant female mammalian subject comprising: testing in a maternal serum sample obtained from said subject the level of two or more proteins selected from the group consisting of cystatin-C (SEQ ID NO: 11), alpha-1-acid glycoprotein 1 (SEQ ID NO: 104), beta-2-microglobulin (SEQ ID NO: 45), cathepsin D (SEQ ID NO: 7), laminin subunit beta-1 (SEQ ID NO: 21), fibronectin (SEQ ID NO:15), chorionic somatomammotropin hormone (SEQ ID NO: 10), SH3 domain-binding glutamic acid-rich-like protein 3 (SEQ ID NO: 30), filamin-A (SEQ ID NO: 16), profilin-1 (SEQ ID NO: 25), serum amyloid P-component (SEQ ID NO: 65), fructose-biphosphate aldolase A (SEQ ID NO: 106), transgelin-2 (SEQ ID NO: 31), vinculin (SEQ ID NO: 36), cartilage acidic protein 1 (SEQ ID NO:50), plastin-2 (SEQ ID NO: 24), tropomyosin alpha-4 chain (SEQ ID NO: 33), 14-3-3 protein zeta/delta (SEQ ID NO: 108), alpha-actinin-1 (SEQ ID NO: 112), catalase (SEQ ID NO: 72), phospholipid transfer protein (SEQ ID NO: 94), phosphoglycerate mutase 1 (SEQ ID NO: 113), peroxiredoxin-2 (SEQ ID NO: 77), trem-like transcript 1 protein (SEQ ID NO: 114), choriogonadotropin subunit beta (SEQ ID NO: 8), glutathione S-transferase P (SEQ ID NO: 115), leucyl-cystinyl aminopeptidase (SEQ ID NO: 116), vascular endothelial growth factor receptor 3 (SEQ ID NO: 35), adenylyl cyclase-associated protein 1 (SEQ ID NO: 117), matrix metalloproteinase-9 (SEQ ID NO: 23), peptidyl-prolyl cis-trans isomerase A (SEQ ID NO: 118), transketolase (SEQ ID NO: 119), and phosphoglycerate kinase 1 (SEQ ID NO: 120), relative to the level in normal maternal serum or maternal serum known to be indicative of gestational hypertension; and diagnosing said subject with gestational hypertension if said level shows a statistically significant difference relative to the level in said normal maternal serum, or does not show a statistically significant difference relative to the level in said maternal serum known to be indicative of gestational hypertension.

[0036] In a specific embodiment, the subject is a human patient.

[0037] In other embodiments, the methods include testing the level of at least three, at least four, at least five, at least six, etc. of the listed proteins, in any combination.

[0038] In one embodiment, the methods include testing the level of proteins Pappalysin-2 (SEQ ID NO: 38), choriogonadotropin subunit beta (SEQ ID NO: 8), histidine rich glycoprotein (SEQ ID NO: 19), plasma retinol-binding protein (SEQ ID NO: 29), Matrix metalloproteinase-9 (SEQ ID NO: 23), Apolipoprotein B-100 (SEQ ID NO: 3), endoglin (SEQ ID NO: 12), and Vascular endothelial growth factor receptor 1 (SEQ ID NO: 121).

[0039] In certain embodiments, level is determined by an immunoassay, by mass spectrometry, and/or by using a protein array.

[0040] In another aspect, the invention provides a report comprising the results of and/or diagnosis based on a test comprising testing in a maternal serum sample obtained from said subject the level of two or more proteins selected from the group consisting of cystatin-C (SEQ ID NO: 11), alpha-1-acid glycoprotein 1 (SEQ ID NO: 104), beta-2-microglobulin (SEQ ID NO: 45), cathepsin D (SEQ ID NO: 7), laminin subunit beta-1 (SEQ ID NO: 21), fibronectin (SEQ ID NO:15), chorionic somatomammotropin hormone (SEQ ID NO: 10), SH3 domain-binding glutamic acid-rich-like protein 3 (SEQ ID NO: 30), filamin-A (SEQ ID NO: 16), profilin-1 (SEQ ID NO: 25), serum amyloid P-component (SEQ ID NO: 65), fructose-biphosphate aldolase A (SEQ ID NO: 106), transgelin-2 (SEQ ID NO: 31), vinculin (SEQ ID NO: 36), cartilage acidic protein 1 (SEQ ID NO:50), plastin-2 (SEQ ID NO: 24), tropomyosin alpha-4 chain (SEQ ID NO: 33), 14-3-3 protein zeta/delta (SEQ ID NO: 108), alpha-actinin-1 (SEQ ID NO: 112), catalase (SEQ ID NO: 72), phospholipid transfer protein (SEQ ID NO: 94), phosphoglycerate mutase 1 (SEQ ID NO: 113), peroxiredoxin-2 (SEQ ID NO: 77), trem-like transcript 1 protein (SEQ ID NO: 114), choriogonadotropin subunit beta (SEQ ID NO: 8), glutathione S-transferase P (SEQ ID NO: 115), leucyl-cystinyl aminopeptidase (SEQ ID NO: 116), vascular endothelial growth factor receptor 3 (SEQ ID NO: 35), adenylyl cyclase-associated protein 1 (SEQ ID NO: 117), matrix metalloproteinase-9 (SEQ ID NO: 23), peptidyl-prolyl cis-trans isomerase A (SEQ ID NO: 118), transketolase (SEQ ID NO: 119), and phosphoglycerate kinase 1 (SEQ ID NO: 120), relative to the level in normal maternal serum or maternal serum known to be indicative of gestational hypertension; and diagnosing said subject with gestational hypertension if said level shows a statistically significant difference relative to the level in said normal maternal serum, or does not show a statistically significant difference relative to the level in said maternal serum known to be indicative of gestational hypertension.

[0041] In another aspect, the invention provides a tangible medium storing the results of and/or diagnosis based on a test comprising testing in a maternal serum sample obtained from said subject the level of two or more proteins selected from the group consisting of cystatin-C (SEQ ID NO: 11), alpha-1-acid glycoprotein 1 (SEQ ID NO: 104), beta-2-microglobulin (SEQ ID NO: 45), cathepsin D (SEQ ID NO: 7), laminin subunit beta-1 (SEQ ID NO: 21), fibronectin (SEQ ID NO:15), chorionic somatomammotropin hormone (SEQ ID NO: 10), SH3 domain-binding glutamic acid-rich-like protein 3 (SEQ ID NO: 30), filamin-A (SEQ ID NO: 16), profilin-1 (SEQ ID NO: 25), serum amyloid P-component (SEQ ID NO: 65), fructose-biphosphate aldolase A (SEQ ID NO: 106), transgelin-2 (SEQ ID NO: 31), vinculin (SEQ ID NO: 36), cartilage acidic protein 1 (SEQ ID NO:50), plastin-2 (SEQ ID NO: 24), tropomyosin alpha-4 chain (SEQ ID NO: 33), 14-3-3 protein zeta/delta (SEQ ID NO: 108), alpha-actinin-1 (SEQ ID NO: 112), catalase (SEQ ID NO: 72), phospholipid transfer protein (SEQ ID NO: 94), phosphoglycerate mutase 1 (SEQ ID NO: 113), peroxiredoxin-2 (SEQ ID NO: 77), trem-like transcript 1 protein (SEQ ID NO: 114), choriogonadotropin subunit beta (SEQ ID NO: 8), glutathione S-transferase P (SEQ ID NO: 115), leucyl-cystinyl aminopeptidase (SEQ ID NO: 116), vascular endothelial growth factor receptor 3 (SEQ ID NO: 35), adenylyl cyclase-associated protein 1 (SEQ ID NO: 117), matrix metalloproteinase-9 (SEQ ID NO: 23), peptidyl-prolyl cis-trans isomerase A (SEQ ID NO: 118), transketolase (SEQ ID NO: 119), and phosphoglycerate kinase 1 (SEQ ID NO: 120), relative to the level in normal maternal serum or maternal serum known to be indicative of gestational hypertension; and diagnosing said subject with gestational hypertension if said level shows a statistically significant difference relative to the level in said normal maternal serum, or does not show a statistically significant difference relative to the level in said maternal serum known to be indicative of gestational hypertension.

[0042] In one other aspect, the invention provides a method for the diagnosis of placental insufficiency in a pregnant female mammalian subject having preeclampsia comprising testing in a maternal serum sample obtained from said subject the level of two or more proteins selected from the group consisting of fibronectin (SEQ ID NO:15), vascular endothelial growth factor receptor 3 (SEQ ID NO: 35), chorionic somatomammortrophin (SEQ ID NO: 10), and pregnancy-specific glycoprotein (SEQ ID NO: 26), relative to the level in normal maternal serum or maternal serum known to be indicative of placental insufficiency; and diagnosing said subject with placental insufficiency if said level shows a statistically significant difference relative to the level in said normal maternal serum, or does not show a statistically significant difference relative to the level in said maternal serum known to be indicative of placental insufficiency.

[0043] In a specific embodiment, the subject is a human patient.

[0044] In other embodiments, the methods include testing the level of at least three, at least four, etc. of the listed proteins, in any combination.

[0045] In certain embodiments, level is determined by an immunoassay, by mass spectrometry, and/or by using a protein array.

[0046] In another aspect, the invention provides a report comprising the results of and/or diagnosis based on a test comprising testing in a maternal serum sample obtained from said subject the level of two or more proteins selected from the group consisting of fibronectin (SEQ ID NO:15), vascular endothelial growth factor receptor 3 (SEQ ID NO: 35), chorionic somatomammortrophin (SEQ ID NO: 10), and pregnancy-specific glycoprotein (SEQ ID NO: 26), relative to the level in normal maternal serum or maternal serum known to be indicative of placental insufficiency; and diagnosing said subject with placental insufficiency if said level shows a statistically significant difference relative to the level in said normal maternal serum, or does not show a statistically significant difference relative to the level in said maternal serum known to be indicative of placental insufficiency.

[0047] In still another aspect, the invention provides a tangible medium storing the results of and/or diagnosis based on a test comprising testing in a maternal serum sample obtained from said subject the level of two or more proteins selected from the group consisting of fibronectin (SEQ ID NO:15), vascular endothelial growth factor receptor 3 (SEQ ID NO: 35), chorionic somatomammortrophin (SEQ ID NO: 10), and pregnancy-specific glycoprotein (SEQ ID NO: 26), relative to the level in normal maternal serum or maternal serum known to be indicative of placental insufficiency; and diagnosing said subject with placental insufficiency if said level shows a statistically significant difference relative to the level in said normal maternal serum, or does not show a statistically significant difference relative to the level in said maternal serum known to be indicative of placental insufficiency.

[0048] In one embodiment, the methods of the invention include the testing is implemented using an apparatus adapted to determine the level of said proteins. In another embodiment, the testing is performed by using a software program executed by a suitable processor. In certain embodiments, the program is embodied in software stored on a tangible medium. In certain other embodiments, the tangible medium is selected from the group consisting of a flash drive, a CD-ROM, a floppy disk, a hard drive, a DVD, and a memory associated with the processor.

[0049] In certain embodiments, the methods of the invention further comprise the step of preparing a report recording the results of said testing or the diagnosis. In one embodiment, the report is recorded or stored on a tangible medium. In another embodiment, the tangible medium is paper. In other embodiments, the tangible medium is selected from the group consisting of a flash drive, a CD-ROM, a floppy disk, a hard drive, a DVD, and a memory associated with the processor.

[0050] In one embodiment, the methods of the invention further comprise the step of communicating the results of said diagnosis to an interested party. In certain embodiments, the interested party is the patient or the attending physician. In certain other embodiments, the communication is in writing, by email, or by telephone.

[0051] In another aspect, the invention concerns the use of proteins in the preparation or manufacture of proteomic profiles as a means for the early determination of the state of a maternal or fetal condition, e.g., preeclampsia, gestational hypertension, and/or placental insufficiency.

### BRIEF DESCRIPTION OF THE DRAWINGS

[0052] FIG. 1 depicts the performance of combinations of candidate protein biomarkers for classifying samples with or without pre-eclampsia (sensitivity at FP=20% indicated).

### DETAILED DESCRIPTION OF THE PREFERRED EMBODIMENT

### I. Definitions

[0053] Unless defined otherwise, technical and scientific terms used herein have the same meaning as commonly understood by one of ordinary skill in the art to which this invention belongs. Singleton et al., Dictionary of Microbiology and Molecular Biology 2nd ed., J. Wiley & Sons (New York, N.Y. 1994) provides one skilled in the art with a general guide to many of the terms used in the present application.

[0054] The term “proteome” is used herein to describe a significant portion of proteins in a biological sample at a given time. The concept of proteome is fundamentally different from the genome. While the genome is virtually static, the proteome continually changes in response to internal and external events.

[0055] The term “proteomic profile” is used to refer to a representation of the expression pattern of a plurality of proteins in a biological sample, e.g. a biological fluid at a given time. The proteomic profile can, for example, be represented as a mass spectrum, but other representations based on any physicochemical or biochemical properties of the proteins are also included. Thus the proteomic profile may, for example, be based on differences in the electrophoretic properties of proteins, as determined by two-dimensional gel electrophoresis, e.g. by 2-D PAGE, and can be represented, e.g. as a plurality of spots in a two-dimensional electrophoresis gel. Differential expression profiles may have important diagnostic value, even in the absence of specifically identified proteins. Single protein spots can then be detected, for example, by immunoblotting, multiple spots or proteins using protein microarrays. The proteomic profile typically represents or contains information that could range from a few peaks to a complex profile representing 50 or more peaks. Thus, for example, the proteomic profile may contain or represent at least 2, or at least 5 or at least 10 or at least 15, or at least 20, or at least 25, or at least 30, or at least 35, or at least 40, or at least 45, or at least 50, or at least 60, or at least 65, or at least 70, or at least 75, or at least 80, or at least 85, or at least 85, or at least 90, or at least 95, or at least 100, or at least 125, or at least 150, or at least 175, or at least 200 proteins.

[0056] The term “biological fluid” as used herein refers to refers to liquid material derived from a human or other animal. Biological fluids include, but are not limited to, cord blood, neonatal serum, cerebrospinal fluid (CSF), cervical-vaginal fluid (CVF), amniotic fluid, serum, plasma, urine, cerebrospinal fluid, breast milk, mucus, saliva, and sweat.

[0057] By “pre-eclampsia” is meant the multi-system disorder that is characterized by hypertension with proteinuria or edema, or both, glomerular dysfunction, brain edema, liver edema, or coagulation abnormalities due to pregnancy or the influence of a recent pregnancy and all complications associated with the disorder. Pre-eclampsia generally occurs after the 20^{th} week of gestation. Pre-eclampsia is generally defined as some combination of the following symptoms: (1) a systolic blood pressure (BP)>140 mmHg and a diastolic BP>90 mmHg after 20 weeks gestation (generally measured on two occasions, 4-168 hours apart), (2) new onset proteinuria (1+ by dipstick on urinanaysis, >300 mg of protein in a 24-hour urine collection, or a single random urine sample having a protein/creatinine ratio>0.3), and (3) resolution of hypertension and proteinuria by 12 weeks postpartum. Severe pre-eclampsia is generally defined as (1) a diastolic BP>110 mmHg (generally measured on two occasions, 4-168 hours apart) or (2) proteinuria characterized by a measurement of 3.5 g or more protein in a 24-hour urine collection or two random urine specimens with at least 3+ protein by dipstick. In pre-eclampsia, hypertension and proteinuria generally occur within seven days of each other. In severe pre-eclampsia, severe hypertension, severe proteinuria and HELLP syndrome (hemolysis, elevated liver enzymes, low platelets) or eclampsia can occur simultaneously or only one symptom at a time. Occasionally, severe pre-eclampsia can lead to the development of seizures. This severe form of the syndrome is referred to as “eclampsia.” Eclampsia can also include dysfunction or damage to several organs or tissues such as the liver (e.g., hepatocellular damage, periportal necrosis) and the central nervous system (e.g., cerebral edema and cerebral hemorrhage). The etiology of the seizures is thought to be secondary to the development of cerebral edema and focal spasm of small blood vessels in the kidney. Preeclampsia is associated with fetal complications such as intrauterine growth retardation (IUGR) and small for gestational age (SGA).

[0058] By “small for gestational age (SGA)” is meant a fetus whose birth weight is a weight less than 2,500 gm (5 lbs. 8 oz.) or below the 10^{th} percentile for gestational age according to U.S. tables of birth weight for gestational age by race, parity, and infant sex as defined by World Health Organization (WHO) (Zhang and Bowes, Obstet. Gynecol. 86:200-208, 1995).

[0059] “Patient response” can be assessed using any endpoint indicating a benefit to the patient, including, without limitation, (1) inhibition, at least to some extent, of the progression of a pathologic condition, (2) prevention of the pathologic condition, (3) relief, at least to some extent, of one or more symptoms associated with the pathologic condition; (4) increase in the length of survival following treatment; and/or (5) decreased mortality at a given point of time following treatment.

[0060] The term “treatment” refers to both therapeutic treatment and prophylactic or preventative measures, wherein the object is to prevent or slow down (lessen) the targeted pathologic condition or disorder. Those in need of treatment include those already with the disorder as well as those prone to have the disorder or those in whom the disorder is to be prevented.

[0061] The designation of any particular protein, as used herein, includes all fragments, precursors, and naturally occurring variants, such as alternatively spliced and allelic variants and isoforms, as well as soluble forms of the protein named, along with native sequence homologs (including all naturally occurring variants) in other species. Thus, for example, when it is stated that the abundance of haptoglobin precursor (Swiss-Prot Acc. No. P00738) is tested, the statement specifically includes testing any fragments, precursers, or naturally occurring variant of the protein listed under Swiss-Prot Acc. No. P00738, as well as its non-human homologs and naturally occurring variants thereof, if subject is non-human.

### II. Detailed Description

[0062] The present invention concerns, in one aspect, methods and means for an early, reliable and non-invasive testing of pre-eclampsia and associated complications in pregnant women by proteomic analysis of maternal serum. The invention further concerns, in another aspect, identification of biomarkers of pre-eclampsia, including pre-eclampsia during early gestation, such as in the first trimester of pregnancy, e.g., during 9 to 11 weeks, and also during 10 to 14 weeks, using proteomics techniques. In another aspect, the invention concerns methods and means for an early, reliable and non-invasive testing of gestational hypertension, or pregnancy-induced hypertension, in pregnant women by proteomic analysis of maternal serum. In yet another aspect, methods and means for an early, reliable and non-invasive testing of placental insufficiency in pregnant women by proteomic analysis of maternal serum. In another aspect, the invention concerns the use of proteins in the preparation or manufacture of proteomic profiles as a means for the early determination of the state of a maternal or fetal condition, e.g., preeclampsia, gestational hypertension, and/or placental insufficiency. The invention utilizes proteomics techniques well known in the art, as described, for example, in the following textbooks, the contents of which are hereby expressly incorporated by reference: Proteome Research: New Frontiers in Functional Genomics (Principles and Practice), M. R. Wilkins et al., eds., Springer Verlag, 1007; 2-D Proteome Analysis Protocols, Andrew L Link, editor, Humana Press, 1999; Proteome Research: Two-Dimensional Gel Electrophoresis and Identification Methods (Principles and Practice), T. Rabilloud editor, Springer Verlag, 2000; Proteome Research: Mass Spectrometry (Principles and Practice), P. James editor, Springer Verlag, 2001; Introduction to Proteomics, D. C. Liebler editor, Humana Press, 2002; Proteomics in Practice: A Laboratory Manual of Proteome Analysis, R. Westermeier et al., eds., John Wiley & Sons, 2002.

[0063] One skilled in the art will recognize many methods and materials similar or equivalent to those described herein, which could be used in the practice of the present invention. Indeed, the present invention is in no way limited to the methods and materials described.

[0064] 1. Identification of Proteins and Polypeptides Expressed in Biological Fluids

[0065] According to the present invention, proteomics analysis of biological fluids can be performed using a variety of methods known in the art. Biological fluids include, for example, cervical-vaginal fluid (CVF), amniotic fluid, serum, plasma, urine, cerebrospinal fluid, breast milk, mucus, and saliva.

[0066] Typically, protein patterns (proteome maps) of samples from different sources, such as normal biological fluid (normal sample) and a test biological fluid (test sample), are compared to detect proteins that are up- or down-regulated in a disease. These proteins can then be excised for identification and full characterization, e.g. using peptide-mass fingerprinting and/or mass spectrometry and sequencing methods, or the normal and/or disease-specific proteome map can be used directly for the diagnosis of the disease of interest, or to confirm the presence or absence of the disease.

[0067] In comparative analysis, it is important to treat the normal and test samples exactly the same way, in order to correctly represent the relative abundance of proteins, and obtain accurate results. The required amount of total proteins will depend on the analytical technique used, and can be readily determined by one skilled in the art. The proteins present in the biological samples are typically separated by two-dimensional gel electrophoresis (2-DE) according to their pI and molecular weight. The proteins are first separated by their charge using isoelectric focusing (one-dimensional gel electrophoresis). This step can, for example, be carried out using immobilized pH-gradient (IPG) strips, which are commercially available. The second dimension is a normal SDS-PAGE analysis, where the focused IPG strip is used as the sample. After 2-DE separation, proteins can be visualized with conventional dyes, like Coomassie Blue or silver staining, and imaged using known techniques and equipment, such as, e.g. Bio-Rad GS800 densitometer and PDQUEST software, both of which are commercially available. Individual spots are then cut from the gel, destained, and subjected to tryptic digestion. The peptide mixtures can be analyzed by mass spectrometry (MS). Alternatively, the peptides can be separated, for example by capillary high pressure liquid chromatography (HPLC) and can be analyzed by MS either individually, or in pools.

[0068] Mass spectrometers consist of an ion source, mass analyzer, ion detector, and data acquisition unit. First, the peptides are ionized in the ion source. Then the ionized peptides are separated according to their mass-to-charge ratio in the mass analyzer and the separate ions are detected. Mass spectrometry has been widely used in protein analysis, especially since the invention of matrix-assisted laser-desorption ionisation/time-of-flight (MALDI-TOF) and electrospray ionisation (ESI) methods. There are several versions of mass analyzer, including, for example, MALDI-TOF and triple or quadrupole-TOF, or ion trap mass analyzer coupled to ESI. Thus, for example, a Q-Tof-2 mass spectrometer utilizes an orthogonal time-of-flight analyzer that allows the simultaneous detection of ions across the full mass spectrum range. For further details see, e.g. Chemusevich et al., J. Mass Spectrom. 36:849-865 (2001).

[0069] If desired, the amino acid sequences of the peptide fragments and eventually the proteins from which they derived can be determined by techniques known in the art, such as certain variations of mass spectrometry, or Edman degradation.

[0070] 2. Early Detection of Pre-Eclampsia and Related Complications

[0071] Preeclampsia, defined as maternal hypertension accompanied by proteinuria, edema, or both, occurs in 7% of pregnancies not terminating in the first trimester. Although the cause is unknown, it is more common in extremes of age in childbearing, maternal diabetes, pregnancies with multiple gestations, and pre-existing maternal renal disease and or hypertension. Preeclampsia is associated with increases in perinatal mortality, and may also lead to eclampsia, characterized by maternal seizures and increased maternal mortality.

[0072] Complications of preeclampsia include intrauterine growth retardation (IUGR), small for gestational age (SGA) and HELLP syndrome. Small for Gestational Age (SGA) babies are those whose birth weight lies below the 10^{th} percentile for that gestational age (see above). The incidence of SGA in developed countries is 8.1%. Pre-eclampsia is a condition known to be associated with intrauterine fetal growth restriction (IUGR) and SGA. The etiology, however, can be maternal, fetal or placental. Fetal risk factors include, for example, chromosomal abnormality and infection. Maternal risk factors include, for example, preeclampsia, thrombophilias, antiphospholipid syndrome, defective placentation, sickle cell anemia, drug use, alcohol, and smoking. Accurate diagnosis is complicated by ultra sound assessments and accurate estimation of gestational age. Development of early and reliable markers for SGA is imperative to allow for therapy and intervention to optimize the outcome for the neonate and mother.

[0073] HELLP, a syndrome consisting of Hemolysis, Elevated liver enzyme Levels and Low Platelet count, is an obstetric complication that is frequently misdiagnosed at initial presentation. HELLP syndrome occurs in approximately 0.2 to 0.6 percent of all pregnancies. The mainstay of therapy is supportive management, including seizure prophylaxis and blood pressure control in patients with hypertension. Because the symptoms of HELLP syndrome are variable, diagnosis is often delayed. Early diagnosis, however, is critical, and thus, development of early and reliable markers for HELLP syndrome is imperative to allow for therapy and intervention to optimize the outcome for the neonate and mother.

[0074] Currently the mainstay of therapy for preeclampsia is delivery and anticonvulsant prophylaxis with magnesium sulfate. Prior to the advent of magnesium sulfate therapy, the observed maternal mortality was 20-30%. However, with prompt diagnosis, allowing anticonvulsant therapy with magnesium sulfate, anti-hypertensives, and delivery the maternal mortality has been reduced to near zero.

[0075] Unfortunately, the diagnosis of preeclampsia based upon commonly recognized symptoms and signs is frequently difficult, and occurs late in the course of the disease. Frequently fetal compromise in growth or well-being is the first recognized manifestation of preeclampsia. Laboratory markers for preeclampsia include quantitation of proteinuria, and elevated serum concentrations of uric acid or creatinine. There are no currently available serum markers for early preeclampsia or markers which identify women which will develop preeclampsia. Recently prospective serum markers including leptin and uric acid have been associated with subsequent preeclampsia in one study (Gursoy T, et al. Preeclampsia disrupts the normal physiology of leptin.: Am J Perinatol.19(6):303-10, 2002) but much work is needed to confirm these findings. Development of early and reliable markers for preeclampsia and related complications is imperative to allow for therapy and intervention to minimize associated complications and optimize the outcome for the neonate and mother.

[0076] 3. Early Detection and Diagnosis of Pre-Eclampsia Using Maternal Serum Biomarkers

[0077] The present invention provides reliable, non-invasive method for the diagnosis of the pre-eclampsia using biomarkers identified in the maternal serum using a proteomics approach. The diagnosis can be performed any time during pregnancy, including early gestation, including the first trimester. In one embodiment, the diagnosis can be performed between about 9 and about 11 gestational weeks. In another embodiment, the diagnosis can be performed between about 10 and about 14 weeks.

[0078] As noted before, in the context of the present invention the term “proteomic profile” is used to refer to a representation of the expression pattern of a plurality of proteins in a biological sample, e.g. a biological fluid at a given time. The proteomic profile can, for example, be represented as a mass spectrum, but other representations based on any physicochemical or biochemical properties of the proteins are also included. Although it is possible to identify and sequence all or some of the proteins present in the proteome of a biological fluid, this is not necessary for the diagnostic use of the proteomic profiles generated in accordance with the present invention. Diagnosis of a particular disease can be based on characteristic differences (unique expression signatures) between a normal proteomic profile, and proteomic profile of the same biological fluid obtained under the same circumstances, when the disease or pathologic condition to be diagnosed is present. The unique expression signature can be any unique feature or motif within the proteomic profile of a test or reference biological sample that differs from the proteomic profile of a corresponding normal biological sample obtained from the same type of source, in a statistically significant manner. For example, if the proteomic profile is presented in the form of a mass spectrum, the unique expression signature is typically a peak or a combination of peaks that differ, qualitatively or quantitatively, from the mass spectrum of a corresponding normal sample. Thus, the appearance of a new peak or a combination of new peaks in the mass spectrum, or any statistically significant change in the amplitude or shape of an existing peak or combination of existing peaks, or the disappearance of an existing peak, in the mass spectrum can be considered a unique expression signature. When the proteomic profile of the test sample obtained from a mammalian subject is compared with the proteomic profile of a reference sample comprising a unique expression signature characteristic of a pathologic maternal or fetal condition, the mammalian subject is diagnosed with such pathologic condition if it shares the unique expression signature with the reference sample.

[0079] A particular pathologic maternal/fetal condition can be diagnosed by comparing the proteomic profile of a biological fluid obtained from the subject to be diagnosed with the proteomic profile of a normal biological fluid of the same kind, obtained and treated the same manner. If the proteomic profile of the test sample is essentially the same as the proteomic profile of the normal sample, the subject is considered to be free of the subject pathologic maternal/fetal condition. If the proteomic profile of the test sample shows a unique expression signature relative to the proteomic profile of the normal sample, the subject is diagnosed with the maternal/fetal condition in question.

[0080] Alternatively or in addition, the proteomic profile of the test sample may be compared with the proteomic profile of a reference sample, obtained from a biological fluid of a subject independently diagnosed with the pathologic maternal/fetal condition ion question. In this case, the subject is diagnosed with the pathologic condition if the proteomic profile of the test sample shares at least one feature, or a combination of features representing a unique expression signature, with the proteomic profile of the reference sample.

[0081] Statistical methods for comparing proteomic profiles are well known in the art. For example, in the case of a mass spectrum, the proteomic profile is defined by the peak amplitude values at key mass/charge (M/Z) positions along the horizontal axis of the spectrum. Accordingly, a characteristic proteomic profile can, for example, be characterized by the pattern formed by the combination of spectral amplitudes at given M/Z vales. The presence or absence of a characteristic expression signature, or the substantial identity of two profiles can be determined by matching the proteomic profile (pattern) of a test sample with the proteomic profile (pattern) of a reference or normal sample, with an appropriate algorithm. A statistical method for analyzing proteomic patterns is disclosed, for example, in Petricoin III, et al., The Lancet 359:572-77 (2002).; Issaq et al., Biochem Biophys Commun 292:587-92 (2002); Ball et al., Bioinformatics 18:395-404 (2002); and Li et al., Clinical Chemistry Journal, 48:1296-1304 (2002).

[0082] In a particular embodiment, the diagnostic tests of the present invention are performed in the form of protein arrays or immunoassays.

[0083] 4. Maternal Serum Biomarkers of Gestational Hypertension Distinct From Preeclampsia

[0084] Gestational (transient) hypertension, or pregnancy-induced hypertension, is generally characterized as the acute onset of hypertension (systolic blood pressure≧140, diastolic blood pressure≧90, measured at least 6 hours apart on two occasions) in pregnancy or the early puerperium without proteinuria or abnormal edema and resolving within 10 days after delivery. As treatment options differ for gestational hypertension and preeclampsia, there is a need for reliable diagnosis of gestational hypertension that could distinguish from preeclampsia and thus facilitate early intervention strategies.

[0085] Thus, in one aspect, the present invention provides reliable, non-invasive methods for the diagnosis of gestational hypertension, or pregnancy-induced hypertension, distinct from preeclampsia. In one embodiment, the present invention provides a multi-analyte panel of serum biomarkers for gestational hypertension.

[0086] 5. Maternal Serum Biomarkers of Placental Insufficiency in Preeclampsia

[0087] Preeclampsia (PE) and fetal growth restriction are associated with placental insufficiency, which is defined as insufficient blood flow to the placenta during pregnancy. The early prediction of placental insufficiency associated with PE may lead to novel, early interventions to prevent fetal growth restriction. Thus, in one aspect, the present invention provides reliable, non-invasive methods for the diagnosis of placental insufficiency using biomarkers identified in the maternal serum using a proteomics approach. The diagnosis can be performed any time during pregnancy, including early gestation, including the first trimester. In one embodiment, the diagnosis can be performed at about 9 to about 11 gestational weeks. In another embodiment, the diagnosis can be performed at about 10 to about 14 weeks.

[0088] 6. Protein Arrays

[0089] In recent years, protein arrays have gained wide recognition as a powerful means to detect proteins, monitor their expression levels, and investigate protein interactions and functions. They enable high-throughput protein analysis, when large numbers of determinations can be performed simultaneously, using automated means. In the microarray or chip format, that was originally developed for DNA arrays, such determinations can be carried out with minimum use of materials while generating large amounts of data.

[0090] Although proteome analysis by 2D gel electrophoresis and mass spectrometry, as described above, is very effective, it does not always provide the needed high sensitivity and this might miss many proteins that are expressed at low abundance. Protein microarrays, in addition to their high efficiency, provide improved sensitivity.

[0091] Protein arrays are formed by immobilizing proteins on a solid surface, such as glass, silicon, micro-wells, nitrocellulose, PVDF membranes, and microbeads, using a variety of covalent and non-covalent attachment chemistries well known in the art. The solid support should be chemically stable before and after the coupling procedure, allow good spot morphology, display minimal nonspecific binding, should not contribute a background in detection systems, and should be compatible with different detection systems.

[0092] In general, protein microarrays use the same detection methods commonly used for the reading of DNA arrays. Similarly, the same instrumentation as used for reading DNA microarrays is applicable to protein arrays.

[0093] Thus, capture arrays (e.g. antibody arrays) can be probed with fluorescently labelled proteins from two different sources, such as normal and diseased biological fluids. In this case, the readout is based on the change in the fluorescent signal as a reflection of changes in the expression level of a target protein. Alternative readouts include, without limitation, fluorescence resonance energy transfer, surface plasmon resonance, rolling circle DNA amplification, mass spectrometry, resonance light scattering, and atomic force microscopy.

[0094] For further details, see, for example, Zhou H, et al., Trends Biotechnol. 19:S34-9 (2001); Zhu et al., Current Opin. Chem. Biol. 5:40-45-(2001); Wilson and Nock, Angew Chem Int Ed Engl 42:494-500 (2003); and Schweitzer and Kingsmore, Curr Opin Biotechnol 13:14-9 (2002). Biomolecule arrays are also disclosed in U.S. Pat. No. 6,406,921, issued Jun. 18, 2002, the entire disclosure of which is hereby expressly incorporated by reference.

[0095] 7. Immunoassays

[0096] The diagnostic assays of the present invention can also be performed in the form of various immunoassay formats, which are well known in the art. There are two main types of immunoassays, homogenous and heterogenous. In homogenous immunoassays, both the immunological reaction between an antigen and an antibody and the detection are carried out in a homogenous reaction. Heterogeous immunoassays include at least one separation step, which allows the differentiation of reaction products from unreacted reagents.

[0097] ELISA is a heterogenous immunoassay, which has been widely used in laboratory practice since the early 1970's. The assay can be used to detect antigensin various formats.

[0098] In the “sandwich” format the antigen being assayed is held between two different antibodies. In this method, a solid surface is first coated with a solid phase antibody. The test sample, containing the antigen (i.e. a diagnostic protein), or a composition containing the antigen, being measured, is then added and the antigen is allowed to react with the bound antibody. Any unbound antigen is washed away. A known amount of enzyme-labelled antibody is then allowed to react with the bound antigen. Any excess unbound enzyme-linked antibody is washed away after the reaction. The substrate for the enzyme used in the assay is then added and the reaction between the substrate and the enzyme produces a colour change. The amount of visual colour change is a direct measurement of specific enzyme-conjugated bound antibody, and consequently the antigen present in the sample tested.

[0099] ELISA can also be used as a competitive assay. In the competitive assay format, the test specimen containing the antigen to be determined is mixed with a precise amount of enzyme-labelled antigen and both compete for binding to an anti-antigen antibody attached to a solid surface. Excess free enzyme-labelled antigen is washed off before the substrate for the enzyme is added. The amount of color intensity resulting from the enzyme-substrate interaction is a measure of the amount of antigen in the sample tested.

[0100] Homogenous immunoassays include, for example, the Enzyme Multiplied Immunoassay Technique (EMIT), which typically includes a biological sample comprising the compound or compounds to be measured, enzyme-labeled molecules of the compound(s) to be measured, specific antibody or antibodies binding the compound(s) to be measured, and a specific enzyme chromogenic substrate. In a typical EMIT excess of specific antibodies is added to a biological sample. If the biological sample contains the proteins to be detected, such proteins bind to the antibodies. A measured amount of the corresponding enzyme-labelled proteins is then added to the mixture. Antibody binding sites not occupied by molecules of the protein in the sample are occupied with molecules of the added enzyme-labelled protein. As a result, enzyme activity is reduced because only free enzyme-labelled protein can act on the substrate. The amount of substrate converted from a colourless to a coloured form determines the amount of free enzyme left in the mixture. A high concentration of the protein to be detected in the sample causes higher absorbance readings. Less protein in the sample results in less enzyme activity and consequently lower absorbance readings. Inactivation of the enzyme label when the Ag-enzyme complex is Ab-bound makes the EMIT a unique system, enabling the test to be performed without a separation of bound from unbound compounds as is necessary with other immunoassay methods.

[0101] Part of this invention is also an immunoassay kit. In one aspect, the invention includes a sandwich immunoassay kit comprising a capture antibody and a detector antibody. The capture antibody and detector antibody can be monoclonal or polyclonal. In another aspect, the invention includes a diagnostic kit comprising lateral flow devices, such as immunochromatographic strip (ICS) tests, using immunoflowchromatography. The lateral flow devices employ lateral flow assay techniques as generally described in U.S. Pat. Nos. 4,943,522; 4,861,711; 4,857,453; 4,855,240; 4,775,636; 4,703,017; 4,361, 537; 4,235,601; 4,168,146; 4,094,647, the entire contents of each of which is incorporated by reference. In yet another aspect, the immunoassay kit may comprise, for example, in separate containers (a) monoclonal antibodies having binding specificity for the polypeptides used in the diagnosis of a particular maternal/fetal condition, such as preeclampsia; (b) and anti-antibody immunoglobulins. This immunoassay kit may be utilized for the practice of the various methods provided herein. The monoclonal antibodies and the anti-antibody immunoglobulins may be provided in an amount of about 0.001 mg to about 100 grams, and more preferably about 0.01 mg to about 1 gram. The anti-antibody immunoglobulin may be a polyclonal immunoglobulin, protein A or protein G or functional fragments thereof, which may be labeled prior to use by methods known in the art. The diagnostic kit may further include where necessary agents for reducing background interference in a test, agents for increasing signal, software and algorithms for combining and interpolating marker values to produce a prediction of clinical outcome of interest, apparatus for conducting a test, calibration curves and charts, standardization curves and charts, and the like. The test kit may be packaged in any suitable manner, typically with all elements in a single container along with a sheet of printed instructions for carrying out the test.

[0102] 8. Diagnostic and Treatment Methods

[0103] The diagnostic methods of the present invention are valuable tools for practicing physicians to make quick treatment decisions, which are often critical for the survival of the infant and/or mother. Thus, for example, if a pregnant woman shows symptoms of pre-ecplampsia, gestational hypertension or placental insufficiency, it is important to take immediate steps to treat the condition and improve the chances of the survival of the fetus and limit the risks to the mother's health.

[0104] Following the measurement or obtainment of the expression levels of the proteins identified herein, the assay results, findings, diagnoses, predictions and/or treatment recommendations are typically recorded and communicated to technicians, physicians and/or patients, for example. In certain embodiments, computers will be used to communicate such information to interested parties, such as, patients and/or the attending physicians. In some embodiments, the assays will be performed or the assay results analyzed in a country or jurisdiction which differs from the country or jurisdiction to which the results or diagnoses are communicated.

[0105] In a preferred embodiment, a diagnosis, prediction and/or treatment recommendation based on the expression level in a test subject of one or more of the biomarkers herein is communicated to the subject as soon as possible after the assay is completed and the diagnosis and/or prediction is generated. The one or more biomarkers identified and quantified in the methods described herein can be contained in one or more panels. The number of biomarkers comprising a panel can include 1 biomarker, 2 biomarkers, 3 biomarkers, 4 biomarkers, 5 biomarkers, 6 biomarkers, 7 biomarkers, 8 biomarkers, 9 biomarkers, 10 biomarkers, 11 biomarkers, 12 biomarkers, 13 biomarkers, 14 biomarkers, 15 biomarkers, 16 biomarkers, 17 biomarkers, 18 biomarkers, 19 biomarkers, 20 biomarkers, etc. The results and/or related information may be communicated to the subject by the subject's treating physician. Alternatively, the results may be communicated directly to a test subject by any means of communication, including writing, such as by providing a written report, electronic forms of communication, such as email, or telephone. Communication may be facilitated by use of a computer, such as in case of email communications. In certain embodiments, the communication containing results of a diagnostic test and/or conclusions drawn from and/or treatment recommendations based on the test, may be generated and delivered automatically to the subject using a combination of computer hardware and software which will be familiar to artisans skilled in telecommunications. One example of a healthcare-oriented communications system is described in U.S. Pat. No. 6,283,761; however, the present invention is not limited to methods which utilize this particular communications system. In certain embodiments of the methods of the invention, all or some of the method steps, including the assaying of samples, diagnosing of diseases, and communicating of assay results or diagnoses, may be carried out in diverse (e.g., foreign) jurisdictions.

[0106] To facilitate diagnosis, the reference and/or subject biomarker profiles or expression level of one or more of the biomarkers presented herein of the present invention can be displayed on a display device, contained electronically, or in a machine-readable medium, such as but not limited to, analog tapes like those readable by a VCR, CD-ROM, DVD-ROM, USB flash media, e.g., flash drive, among others. Such machine-readable media can also contain additional test results, such as, without limitation, measurements of clinical parameters and traditional laboratory risk factors. Alternatively or additionally, the machine-readable media can also comprise subject information such as medical history and any relevant family history.

[0107] Further details of the invention will be apparent from the following non-limiting examples. All references cited throughout the disclosure, and the references cited therein, are expressly incorporated by reference herein.

### Example 1

### Identification of Maternal Serum Biomarkers of Pre-Eclampsia Using Global Proteomic Approaches

[0108] Experimental Methods

[0109] Sample Collection and Processing (Active PE): A total of 118 human subjects (control n=58, mild PE n=30 and severe PE n=30) were identified prospectively and given informed consent to participate in the study. The mean gestational age of the women at the collection are 33.94±4.31 (control), 35.0±5.58 (mild PE) and 31.24±6.27 weeks (severe PE). All the samples were allowed to clot for 30 min., spun down at 5000 g, supernatant was collected and stored in −80° C. until further processing. Pre-eclampsia was defined as (ACOG criteria) systolic blood pressure of >140 mmHg or diastolic blood pressure>90 mmHg on at least two occasions, 4 hours to 1 week apart and protenuria (>300 mg in a 24 hour urine collection or 2+ on dip stick measurement). Severe pre-eclampsia is defined as systolic blood pressure of >160 mmHg, diastolic blood pressure>110 mmHg and/or protenuria (>300 mg or 3+ on dip stick measurement). All the samples were allowed to clot for 30 min., spun down at 3000 g, supernatant was collected and stored at −80° C. until further processing.

[0110] Multidimensional Liquid Chromatography Tandem Mass Spectrometry (LC-LC-MS/MS; MudPIT): A total of 1 mg each of individually pooled control, mild and severe preeclampsia serum samples (8 samples/pool) were digested with trypsin, separated into 95 fractions using SCX chromatography and analyzed on a Q-toF-2 mass spectrometer connected to a CapLC (Waters, Inc., Milford, Mass.). Data were searched against a Swiss-Prot human database (version 46.6) as perscribed in previous publication (Gravett, MG. IAI). Spectral counting, the total number of MS/MS spectra matched to a particular protein, has been used to assess the relative abundance of a protein in a sample. (Pang, Ginanni et al. 2002; Zybailov, Mosley et al. 2006; Nagalla, Canick et al. 2007)

[0111] Enzyme-Linked Immunosorbent Assay: Concentrations of biomarker proteins in control, mild and severe preeclampsia serum samples were estimated by enzyme-linked immunosorbent assay (ELISA) (Clark and Adams 1977; Nerurkar, Namba et al. 1984).

[0112] Specific antibodies and pure proteins for Apolipoprotein B-100 (ApoB), Cystatin-C (CystatinC), Endoglin (Endoglin), Fibronectin (Fibronectin), Plasma retinol-binding protein (RBP), Apolipoprotein C-III (ApoCIII), Chorionic somatomammotropin hormone (CSH1), Choriogonadotropin subunit beta (βHCG), Pappalysin-2 (PAPPA2), Vascular endothelial growth factor receptor 3 (VEGFR3), Histidine-rich glycoprotein (HPRG), Insulin-like growth factor-binding protein 2 (IGFBP2), Matrix metalloproteinase-9 (MMP9), pregnancy-specific-β-1-glycoprotein 1 (PSG1), were obtained either from Dako, RND or Academy biomed. For the sandwich ELISA, a capture antibody and a detection antibody were used. To facilitate the detection, the antibodies were conjugated with either biotin or horse radish peroxidase (HRP) using Sulfo-NHS-Biotinylation kit (Pierce Biotechnology Inc., Rockford, Ill.). Pure proteins were used as the standards in the assay.

[0113] ELISA plates were prepared by coating with an appropriate capture antibody, in 0.1 M carbonate bicarbonate buffer, pH 9.6, at 4° C. over night. Appropriate dilutions of the standard proteins and serum samples were prepared in 1% BSA, and incubated in the pre-coated plates in triplicate, at a volume of 100 μL/well. A reference serum sample was also assayed in every plate for calculating the plate-to-plate variation. All the incubation steps were done at room temperature for 1 hr. After each incubation steps, the wells were washed with PBST using a power washer (Tecan). Followed by the antigen binding, a biotinylated detection antibody was incubated. Horseradish peroxidase (HRP) conjugated streptavidin was used as the detection components, and tetramethyl benizidine (TMB) reagent (Neogen Corporation) was used as the substrate to develop the color. The reaction was finally stopped by adding 100 μL of 2NH₂SO₄, and the optical density (OD) was measured at 450 nm.

[0114] A standard curve was generated for every ELISA plate by plotting concentrations of the known proteins samples against their OD values, using Softmax Pro (Molecular Devices Corporation). The concentrations of the individual proteins were estimated from the average values of triplicates in comparison to the standard curve. Since the samples were processed in multiple plates, a reference standard (known concentration of pure proteins) was spotted on all the plates and the ELISA values from all the plates are normalized with respect to that standard in order to correct for plate-to-plate variation, and then transformed to natural log scale.

[0115] Statistical Analysis of MudPIT data: Maternal serum proteins with at least three unique peptide identifications in at least one sample are considered for label-free quantitation (spectral counting). In order to reduce false positive rate, protein entries were further curated before subjecting to spectral counting. Shared spectral counts of non-degenerate proteins that belong to same family and have significant sequence homology (>50%) were combined into single entry. Shared spectral counts of non-degenerate proteins that did not fit afore-mentioned criteria were assigned to one of the protein using Occam's razor approach. Spectral counts of all Immunoglobulin and pregnancy-specific-β-1-glycoprotein variants are collapsed into single entries. Curated proteins were then subjected to independent pair-wise comparisons to determine differentially expressed proteins between control and PE.

[0116] Pair-wise comparison was performed using either a 2×2 chi-square test or fisher exact test. Normalization of spectral counts to account for experimental variability was built into the pair-wise comparisons. The method was automated using a SAS program (version 9.1) and all proteins were independently tested. Level of significance was set at 0.05, The fold expression change of differentially expressed proteins was quantified using the equation described as previously published (Old, Meyer-Arendt et al. 2005).

[0117] Statistical Analysis of ELISA data: Candidate protein biomarker concentrations (expressed as ng/mL) measured by ELISA experiments in cohorts of active PE (control (n=58), mild preeclampsia (n=30), and severe preeclampsia (n=30) and first trimester screening (control (n=96), mild preeclampsia (n=33), and severe preeclampsia (n=40). maternal serum samples were log transformed before subjecting them to statistical analysis. Subjects with adequate overall protein in their samples, but with ELISA values under detectable limit for a particular protein were assigned a value of 0.1 rather than 0 to facilitate log-transformation. When transformed to log scale, the value of −2.3 corresponded to those without any protein detected. Independent pair-wise comparisons of log-transformed protein concentrations between control and preeclampsias were performed using one-way analysis of variance (ANOVA) test. The average value on the log-scale values was transformed back to original units (harmonic mean) for presentation. The comparisons of the control group to the latter two groups with preeclampsia were performed as well and receiver-operator characteristic (ROC) curves were constructed to examine the predictive potential of selected biomarkers, singly and in combination. The Bonferroni correction was applied to adjust for multiple comparisons.

[0118] To explore the possibility that two or more markers might be combined to improve classification accuracy, the multi-variable logistic regression models were fit to develop risk scores (predicted probabilities obtained from models). Based on results from single proteins, the classification performance of several different combinations of 2, 3 or 4 proteins were evaluated. ROC curves, and other corresponding measures, were computed based on each of the multi-protein models to choose the most promising combination.

[0119] The descriptive and comparative analyses, logistic regression models, and ROC curves were conducted using SAS software (v9.1).

[0120] Results

[0121] The demographic statistics are presented below in Table 1. Serum draws of 8 subjects from control, mild PE and severe PE were subjected to two-dimensional liquid chromatography tandem mass spectrometry (2-DLC/MS/MS). Selected protein biomarkers from 2-DLC/MS/MS are validated using Enzyme-Linked Immunosorbent Assays.

TABLE 1
Demographic Statistics.

| | | | | | Std | | |
|---|---|---|---|---|---|---|---|
| condition | N | Variable | N | Mean | Dev | Min | Max |
| control | 58 | Gestion age at | 58 | 33.94 | 4.31 | 22.00 | 39.00 |
| | | collection | | | | | |
| Gestational | | Gestion age at | 14 | 34.75 | 4.71 | 23.70 | 38.00 |
| Hypertension | | collection | 14 | 34.53 | 4.52 | 20.00 | 39.00 |
| (PIH) | 14 | Gestion age at | | | | | |
| | | PE start | | | | | |
| Severe PE | | Gestion age at | 30 | 31.24 | 6.27 | 10.30 | 37.70 |
| | | collection | | | | | |
| | 30 | Gestion age at | 30 | 31.17 | 4.00 | 21.00 | 36.00 |
| | | PE start | | | | | |
| Mild PE | | Gestion age at | 30 | 35.00 | 5.58 | 8.10 | 39.40 |
| | | collection | | | | | |
| | 30 | Gestion age at | 30 | 35.51 | 2.54 | 31.00 | 40.00 |
| | | PE start | | | | | |

[0122] A total of 457 unique proteins were identified in this study 38 differentially abundant maternal serum proteins are summarized in Table 2 below. Independent pair-wise differences in abundance between samples were performed for each protein from women with and without PE. Proteins with a relative expression change of ≧1.5 fold and passes the chi-square test with a p-value≦0.05 in any of the comparisons are considered as potentially differentially expressed between the samples. These included pregnancy proteins such as Choriogonadotropin subunit beta and Pappalysin-2, and extracellular matrix signaling factors such as Fibronectin and Matrix metalloproteinase-9.

TABLE 2
Serum Proteins Sharing Significant Changes between Pair-wise Comparisons of
Control, mild PE and severe PE Samples

| | | Mild PE | | vs. Control | |
|---|---|---|---|---|---|
| | | vs. Control | | Severe PE | |
| Swiss-Prot | | Fold | | Fold | |
| Accession | Description | Change^{a} | p-value | Change^{a} | p-value |
| P04217 | Alpha-1B-glycoprotein (SEQ ID NO: 1) | 1.0 | 0.63 | 1.6 | <0.0001 |
| P62736^{b} | Actin (SEQ ID NO: 2) | −1.1 | 0.29 | −2.8 | <0.0001 |
| Q13787^{c} | Apolipoprotein B-100 (SEQ ID NO: 3) | −1.1 | <0.0001 | −3.8 | <0.0001 |
| P02655 | Apolipoprotein C-II (SEQ ID NO: 4) | 1.1 | 0.77 | 4.7 | <0.0001 |
| P02656^{c} | Apolipoprotein C-III (SEQ ID NO: 5) | 2.1 | <0.0001 | 2.9 | <0.0001 |
| P20851 | C4b-binding protein beta chain (SEQ ID NO: 6) | −1.1 | 0.81 | 2 | 0.014 |
| P07339 | Cathepsin D (SEQ ID NO: 7) | 4.9 | 0.063 | 6.8 | 0.0083 |
| P01233^{c} | Choriogonadotropin subunit beta (SEQ ID NO: 8) | −7.6 | 0.0036 | 2.2 | 0.03 |
| P06276 | Cholinesterase (SEQ ID NO: 9) | 1.1 | 0.79 | 2.1 | 0.0044 |
| P01243^{c} | Chorionic somatomammotropin hormone (SEQ ID | −2.9 | 0.0002 | −2.2 | 0.0029 |
| | NO: 10) | | | | |
| P01034^{c} | Cystatin-C (SEQ ID NO: 11) | 6.5 | 0.016 | 10.4 | 0.0003 |
| P17813^{c} | Endoglin (SEQ ID NO: 12) | −1.0 | | 10.4 | 0.0003 |
| P03951 | Coagulation factor XI (SEQ ID NO: 13) | −1.1 | 0.82 | 1.9 | 0.017 |
| P08709 | Coagulation factor VII (SEQ ID NO: 14) | −1.2 | 0.75 | 2.4 | 0.023 |
| Q8IVI8^{c} | Fibronectin (SEQ ID NO: 15) | 2.1 | <0.0001 | 10.9 | <0.0001 |
| P21333 | Filamin-A (SEQ ID NO: 16) | 1.0 | 0.87 | −30 | <0.0001 |
| P05546 | Heparin cofactor 2 (SEQ ID NO: 17) | −1.1 | 0.37 | −1.8 | <0.0001 |
| P26927 | Hepatocyte growth factor-like protein (SEQ ID | 1.3 | 0.34 | 2.2 | 0.0005 |
| | NO: 18) | | | | |
| P04196^{c} | Histidine-rich glycoprotein (SEQ ID NO: 19) | 1.3 | 0.0036 | 1.7 | <0.0001 |
| P18065^{c} | Insulin-like growth factor-binding protein 2 (SEQ ID | −2.7 | | 2.9 | 0.068 |
| | NO: 20) | | | | |
| P07942 | Laminin subunit beta-1 (SEQ ID NO: 21) | 2.5 | | 9.7 | 0.0006 |
| P18428 | Lipopolysaccharide-binding protein (SEQ ID NO: 22) | −1.6 | 0.16 | −2.5 | 0.0096 |
| P14780^{c} | Matrix metalloproteinase-9 (SEQ ID NO: 23) | −1.8 | 0.18 | −3.8 | 0.018 |
| Q9BXP8^{c} | Pappalysin-2 (SEQ ID NO: 38) | −1.0 | | 6 | 0.016 |
| P13796 | Plastin-2 (SEQ ID NO: 24) | −3.3 | <0.0001 | −3 | <0.0001 |
| P07737 | Profilin-1 (SEQ ID NO: 25) | −1.0 | 0.94 | −9.2 | <0.0001 |
| p11464^{b, c} | Pregnancy-specific beta-1-glycoprotein (SEQ ID | −1.2 | 0.02 | −2.1 | <0.0001 |
| | NO: 26) | | | | |
| P23470 | Receptor-type tyrosine-protein phosphatase gamma | −5.1 | 0.03 | −5.5 | 0.025 |
| | (SEQ ID NO: 27) | | | | |
| P20742 | Pregnancy zone protein (SEQ ID NO: 28) | −1.8 | <0.0001 | −1.8 | <0.0001 |
| P02753^{c} | Plasma retinol-binding protein (SEQ ID NO: 29) | −1.0 | 0.72 | 1.8 | <0.0001 |
| Q9H299 | SH3 domain-binding glutamic acid-rich-like protein 3 | −1.5 | 0.32 | −10.7 | 0.0003 |
| | (SEQ ID NO: 30) | | | | |
| P37802 | Transgelin-2 (SEQ ID NO: 31) | −1.3 | 0.44 | −16.9 | <0.0001 |
| Q9Y490 | Talin-1 (SEQ ID NO: 32) | 1.1 | 0.57 | −35.3 | <0.0001 |
| P67936 | Tropomyosin alpha-4 chain (SEQ ID NO: 33) | 1.4 | 0.24 | −16 | <0.0001 |
| Q6EMK4 | Vasorin (SEQ ID NO: 34) | 2.6 | 0.092 | 2.8 | 0.038 |
| P35916^{c} | Vascular endothelial growth factor receptor 3 (SEQ | −8.4 | 0.0018 | −9 | 0.0013 |
| | ID NO: 35) | | | | |
| P18206 | Vinculin (SEQ ID NO: 36) | −1.9 | 0.14 | −3.4 | 0.017 |
| P04275 | von Willebrand factor (SEQ ID NO: 37) | 1.1 | 0.21 | 2 | <0.0001 |

^{a}The fold expression change of protein was quantitated using the formula described in ref. [ ]. Proteins with significant (p-value <= 0.05 as highlighted in bold font and a fold change of >=±1.5) differential expression in any pair-wise comparisons are listed in the above table with their Swiss-Prot accessions.
^{b}Proteins that shared significant sequence homology are collapsed and treated as a single entry.
^{c}Proteins that were ran in immunoassay

[0123] Fourteen of these potential biomarkers were selected for further validation by immunoassay, based on statistical significance and/or potential clinical relevance. Measured protein concentrations from 118 subjects were log-transformed and compared between control and PE using an ANOVA test. The mean concentration of each protein in both groups was transformed back to original units (ng/ml, harmonic mean) for presentation. As summarized in Table 3a below, there were statistically significant differences in concentrations of 6 out of the 14 candidate proteins among women with and without PE. Cystatin-C, Endoglin, Fibronectin, Apolipoprotein C-III, Choriogonadotropin subunit beta and Pappalysin-2 had significantly higher concentrations in maternal serum from women with PE. Matrix metalloproteinase-9 is significantly lower in PE.

TABLE 3a
Differences in 14 candidate protein biomarkers between serum samples obtained from
women with pre-eclampsia versus those without pre-eclampsia.

| | Single Protein Comparisons | | |
|---|---|---|---|
| | Harmonic Mean Value for Each Group | | |
| | PE | No PE | PE vs. No PE |
| Protein | n = 58 | n = 58 | p-value* |
| Apolipoprotein B-100 (SEQ ID NO: 3) | 18255920.57 | 17929645.97 | 0.9605 |
| Cystatin-C (SEQ ID NO: 11) | 2093.82 | 1394.37 | [symbol] |
| Endoglin (SEQ ID NO: 12) | 96.54 | 48.48 | [symbol] |
| Fibronectin (SEQ ID NO: 15) | 1024791.77 | 178377.27 | [symbol] |
| Plasma retinol-binding protein (SEQ ID NO: 29) | 20537.34 | 14262.86 | 0.0221 |
| Apolipoprotein C-III (SEQ ID NO: 5) | 137310.49 | 73136.88 | [symbol] |
| Chorionic somatomammotropin hormone | 40538.20 | 46674.43 | 0.6140 |
| (SEQ ID NO: 10) | | | |
| Choriogonadotropin subunit beta (SEQ ID | 1799.66 | 835.22 | [symbol] |
| NO: 8) | | | |
| Pappalysin-2 (SEQ ID NO: 38) | 736.84 | 72.00 | [symbol] |
| Vascular endothelial growth factor receptor 3 | 50.61 | 52.48 | 0.8081 |
| (SEQ ID NO: 35 | | | |
| Histidine-rich glycoprotein (SEQ ID NO: 19) | 222957.00 | 126733.43 | 0.0182 |
| Insulin-like growth factor-binding protein 2 | 109.96 | 80.48 | 0.0098 |
| (SEQ ID NO: 20) | | | |
| Matrix metalloproteinase-9 (SEQ ID NO: 23) | 226.59 | 386.23 | 0.0171 |
| Pregnancy-specific beta-1-glycoprotein 1 | 35913.88 | 26118.50 | 0.2546 |
| (SEQ ID NO: 26) | | | |

p-value from one-way analysis of variance are on log-transformed data. Bold italics indicate statistically
significant differences between groups after Bonferroni adjustment for multiple comparisons applied

[0124] Simple logistic regression models (Hosmer and Lemeshow 2000) with a binary dependent variable designating PE status (1=PE n=60, 0=Control n=58) were fit for each biomarker individually. The predicted values from these models were used to create Receiver Operating Characteristic (ROC) curves (Pepe 2003). ROC curves are plots of the true positive fraction of a test (sensitivity) versus the false positive fraction (1-specificity) across the entire continuum of observed values. The area under the curve should be between 0.5 (poor discriminant) to 1.0 (perfect discriminant), and can be expressed probabilistically as the probability that a randomly selected pair of PE and control subjects is correctly classified. Standard errors for the AUROC were conducted based on percentiles of bootstrapped distributions (Pepe 2003). Table 3b summarizes the area under the entire receiver operating characteristic curve (AUROC) and 95% confidence intervals (CI) for the 14 potential biomarkers for PE. Fibronectin, Pappalysin-2, Endoglin, Cystatin-C and Apolipoprotein C-III had the best classification performance with AUROCs of 0.91, 0.89, 0.86, 0.77 and 0.76, respectively. As illustrated in FIG. 1, a three-analyte model including Fibronectin, Pappalysin-2 and Matrix metalloproteinase-9 had an improved AUROC of 0.944 (95% CI 0.90-0.98).

TABLE 3b
Performance of 14 candidate protein biomarkers, individually and
in combination, for classifying samples with or without pre-eclampsia.

| | | |
|---|---|---|
| | Area Under | |
| | ROC Curve | 95% CI for |
| Marker | (AUROC) | AUROC |

Individual Proteins

| | | |
|---|---|---|
| Apolipoprotein B-100 (SEQ ID NO: 3) | 0.356 | (0.23-0.44) |
| Cystatin-C (SEQ ID NO: 11) | 0.768 | (0.68-0.86) |
| Endoglin (SEQ ID NO: 12) | 0.857 | (0.79-0.92) |
| Fibronectin (SEQ ID NO: 15) | 0.909 | (0.85-0.97) |
| Plasma retinal-binding protein | 0.683 | (0.58-0.78) |
| (SEQ ID NO: 29) | | |
| Apolipoprotein C-III (SEQ ID NO: 5) | 0.762 | (0.67-0.81) |
| Chorionic somatomammotropin hormone | 0.636 | (0.53-0.74) |
| (SEQ ID NO: 10) | | |
| Choriogonadotropin subunit beta | 0.687 | (0.60-0.79) |
| (SEQ ID NO: 8) | | |
| Pappalysin-2 (SEQ ID NO: 38) | 0.889 | (0.83-0.95) |
| Vascular endothelial growth factor receptor 3 | 0.550 | (0.45-0.66) |
| (SEQ ID NO: 35 | | |
| Histidine-rich glycoprotein (SEQ ID NO: 19) | 0.649 | (0.55-0.75) |
| Insulin-like growth factor-binding protein 2 | 0.670 | (0.57-0.77) |
| (SEQ ID NO: 20) | | |
| Matrix metalloproteinase-9 (SEQ ID NO: 23) | 0.749 | (0.66-0.84) |
| Pregnancy-specific beta-1-glycoprotein 1 | 0.602 | (0.50-0.71) |
| (SEQ ID NO: 26) | | |

Protein Combinations

| | | |
|---|---|---|
| Fibro + PAPPA2 | 0.927 | (0.88-0.97) |
| Fibro + PAPPA2 + MMP9 | 0.944 | (0.90-0.98) |
| Fibro + PAPPA2 + MMP9 + CSH1 | 0.956 | (0.92-0.99) |

### Example 2

### Identification of Maternal Serum Biomarkers of Pre-Eclampsia During Early Gestation

[0125] Experimental Methods

[0126] Sample Collection and Processing: A total of 169 human subjects (control n=96, mild PE n=33 and severe PE n=40) were identified prospectively and given informed consent to participate in the study. The mean gestational age of the women at the collection was 10.1±1.3 weeks. All the samples were allowed to clot for 30 min., spun down at 5000 g, supernatant was collected and stored in −80° C. until further processing. Pre-eclampsia was defined as (ACOG criteria) systolic blood pressure of >140 mmHg or diastolic blood pressure >90 mmHg on at least two occasions, 4 hours to 1 week apart and protenuria (>300 mg in a 24 hour urine collection or 2+ on dip stick measurement). Severe pre-eclampsia is defined as systolic blood pressure of >160 mmHg, diastolic blood pressure>110 mmHg and/or proteinuria (>300 mg or 3+ on dip stick measurement).

[0127] MudPIT analysis, Enzyme-Linked Immunosorbent Assay (ELISA), statistical analysis of MudPIT data, and statistical analysis of ELISA data were performed as in Example 1.

[0128] Results

[0129] A total of 457 unique serum proteins were identified in this study. 45 differentially abundant maternal serum proteins in pre-eclampsia are summarized in Table 4 below. Independent pair-wise differences in abundance between samples were performed for each protein from women with and without PE. Proteins with a relative expression change of >1.5 fold and passes the chi-square test with a p-value<0.05 in any of the comparisons are considered as potentially differentially expressed between the samples. These included pregnancy proteins such as Choriogonadotropin subunit beta and Pappalysin-2, and extracellular matrix signaling factors such as Fibronectin and Matrix metalloproteinase-9.

TABLE 4a
Potential biomarkers for the detection of preeclampsia at gestational age of 9-11 weeks

| | | Fold Change^{a} | | 2 × 2 Chi-square p-value | |
|---|---|---|---|---|---|
| Swiss-Prot | | Mild PE vs. | Severe PE | Mild PE vs. | Severe PE |
| Accession | Protein name | Control | vs. Control | Control | vs. Control |
| P08697^{c} | Alpha-2-antiplasmin (SEQ ID NO: 39) | 1.8 | 2.4 | 0.0005 | <0.0001 |
| P60709 | Actin (SEQ ID NO: 40) | 1.7 | 1.6 | 0.0037 | 0.017 |
| P43652 | Afamin (SEQ ID NO: 41) | 1.5 | 1.7 | <0.0001 | <0.0001 |
| P01008 | Antithrombin-III (SEQ ID NO: 42) | 2.3 | 2.1 | <0.0001 | <0.0001 |
| P02652^{c} | Apolipoprotein A-II (SEQ ID NO: 43) | 5.7 | 5 | <0.0001 | <0.0001 |
| Q9NTQ4 | Attractin (SEQ ID NO: 44) | 2.5 | 2.4 | <0.0001 | <0.0001 |
| P61769^{c} | Beta-2-microglobulin (SEQ ID NO: 45) | 3.5 | 4.3 | 0.04 | 0.0083 |
| Q15582 | Transforming growth factor-beta-induced protein ig-h3 (SEQ | 1.2 | 1.7 | 0.43 | 0.034 |
| | ID NO: 46) | | | | |
| P04003 | C4b-binding protein alpha chain (SEQ ID NO: 47) | −1.6 | −1.6 | <0.0001 | <0.0001 |
| P07339^{c} | Cathepsin D (SEQ ID NO: 7) | 6.8 | 4.4 | 0.003 | 0.029 |
| Q96IY4 | Carboxypeptidase B2 (SEQ ID NO: 48) | 1.7 | 2.2 | 0.015 | 0.0004 |
| P00746^{c} | Complement factor D (SEQ ID NO: 49) | 5.6 | 4.6 | <0.0001 | 0.0003 |
| Q9NQ79 | Cartilage acidic protein 1 (SEQ ID NO: 50) | 3.1 | 2.7 | .0071 | 0.024 |
| P09172 | Dopamine beta-hydroxylase (SEQ ID NO: 51) | 1 | 1.8 | 0.84 | 0.03 |
| P05160 | Coagulation factor XIII B chain (SEQ ID NO: 52) | 2.6 | 2.4 | 0.0009 | 0.0035 |
| P02671 | Fibrinogen alpha chain (SEQ ID NO: 53) | 1.5 | 2.6 | 0.15 | 0.0001 |
| Q8IVI8^{c} | Fibronectin (SEQ ID NO: 15) | 1.6 | 2 | <0.0001 | <0.0001 |
| P21333 | Filamin-A (SEQ ID NO: 16) | 3.3 | 3.6 | 0.0004 | 0.0001 |
| P52566 | Rho GDP-dissociation inhibitor 2 (SEQ ID NO: 54) | 3 | 4.9 | 0.063 | 0.0031 |
| P07359 | Platelet glycoprotein lb alpha chain (SEQ ID NO: 55) | 1.8 | 2.3 | 0.12 | 0.031 |
| P00739 | Haptoglobin-related protein (SEQ ID NO: 56) | 1.7 | 1.7 | <0.0001 | <0.0001 |
| P18428^{c} | Lipopolysaccharide-binding protein (SEQ ID NO: 22) | 13.3 | 8.1 | <0.0001 | <0.0001 |
| P02753^{c} | Plasma retinol-binding protein (SEQ ID NO: 29) | 1.6 | 1.5 | <0.0001 | 0.0001 |
| P02775 | Platelet basic protein (SEQ ID NO: 57) | 1.5 | 1.6 | 0.0045 | 0.0002 |
| P37802 | Transgelin-2 (SEQ ID NO: 31) | 2.2 | 2.3 | 0.044 | 0.031 |
| Q9H4B7 | Tubulin beta-1 chain (SEQ ID NO: 58) | 4 | 3.8 | 0.014 | 0.024 |
| Q9Y490 | Talin-1 (SEQ ID NO: 32) | 2.7 | 2.9 | 0.0014 | 0.0007 |
| P62328 | Thymosin beta-4 (SEQ ID NO: 59) | 1.5 | 4.3 | 0.5 | 0.0024 |
| Q6EMK4^{c} | Vasorin (SEQ ID NO: 34) | 4.6 | 3.9 | 0.0009 | 0.0066 |
| P19320^{c} | Vascular cell adhesion protein 1 (SEQ ID NO: 60) | 5.1 | 3.3 | 0.0031 | 0.038 |
| P04275 | von Willebrand factor (SEQ ID NO: 37) | 2.6 | 2.2 | <0.0001 | <0.0001 |
| P25311 | Zinc-alpha-2-glycoprotein (SEQ ID NO: 61) | −5.6 | −5.1 | <0.0001 | <0.0001 |
| P01023^{c} | Alpha-2-macroglobulin (SEQ ID NO: 62) | −1.78 | −2.12 | <0.0001 | <0.0001 |
| Q13787^{c} | Apolipoprotein B-100 (SEQ ID NO: 3) | −1.48 | −1.49 | <0.0001 | <0.0001 |
| P02656^{c} | Apolipoprotein C-III (SEQ ID NO: 5) | 1.93 | 1.89 | 0.009 | 0.012 |
| P01233^{c} | Choriogonadotropin subunit beta (SEQ ID NO: 8) | 1.46 | 1.4 | 0.0065 | 0.0127 |
| P01243^{b, c} | Chorionic somatomammotropin hormone (SEQ ID NO: 10) | 2.02 | −1.66 | 0.299 | N/A |
| P01034^{c} | Cystatin-C (SEQ ID NO: 11) | −1.69 | −1.43 | 0.515 | 0.757 |
| P17813^{c} | Endoglin (SEQ ID NO: 12) | −1.69 | 1.14 | 1 | 1 |
| P14780^{c} | Matrix metalloproteinase-9 (SEQ ID NO: 23) | 1.38 | 1.52 | 0.594 | 0.44 |
| Q13219^{c} | Pappalysin-1 (SEQ ID NO: 63) | −1.82 | −1.26 | 0.628 | 0.531 |
| Q9P1W5^{c} | Pregnancy-specific beta-1-glycoprotein 1 (SEQ ID NO: 26) | 1.01 | 1.06 | 0.922 | 0.708 |
| P35916^{c} | Vascular endothelial growth factor receptor 3 | −1.69 | −1.15 | 1 | 1 |
| | (SEQ ID NO: 35) | | | | |
| P02741^{c} | C-reactive protein (SEQ ID NO: 64) | −1 | −1.05 | 0.8994 | 0.9966 |
| P02743^{c} | Serum amyloid P-component (SEQ ID NO: 65) | 1.17 | 2.57 | 0.6 | 0.0068 |

^{a}The fold expression change of protein was quantitated using the formula described in ref. [ ]
^{b}Proteins that showed significant fold change but did not reach statistical significance due to small number of spectral counts
^{c}Proteins that were run in immunoassay
Bold values in p-value columns are <0.05

TABLE 4b
Potential biomarkers for the detection of preeclampsia at gestational age of 10-14
weeks

| | | Fold Change | | | P-value | | |
|---|---|---|---|---|---|---|---|
| Swiss | | Mild PE | Severe | Severe | Mild PE | Severe | Severe |
| Prot | | vs. | PE vs. | PE vs. | vs. | PE vs. | PE vs. |
| Accession | Description | Control | Control | Mild PE | Control | Control | Mild PE |
| Q16853 | Membrane copper amine | 2.6 | 5.8 | 2.2 | | 1.1E−02 | 1.4E−01 |
| | oxidase (SEQ ID NO: 103) | | | | | | |
| P02741 | C-reactive protein (SEQ ID | 5.9 | 5.7 | −1.0 | 1.0E−03 | 1.7E−03 | 8.9E−01 |
| | NO: 64) | | | | | | |
| P02743 | Serum amyloid P-component | 2.4 | 5.3 | 2.2 | 6.2E−02 | 1.1E−05 | 5.7E−03 |
| | (SEQ ID NO: 65) | | | | | | |
| Q9BXR6 | Complement factor H-related | 5.1 | 5.2 | 1.0 | 2.1E−02 | 2.0E−02 | 9.8E−01 |
| | protein 5 (SEQ ID NO: 67) | | | | | | |
| Q9Y6V0 | Protein piccolo (SEQ ID NO: 68) | −1.3 | 4.6 | 5.9 | | 3.8E−02 | 1.5E−02 |
| P12955 | Xaa-Pro dipeptidase (SEQ ID | −1.3 | 4.6 | 5.9 | | 3.8E−02 | 1.5E−02 |
| | NO: 69) | | | | | | |
| Q9UPA5 | Protein bassoon (SEQ ID | −1.3 | 3.9 | 5.1 | | 7.2E−02 | 3.0E−02 |
| | NO: 70) | | | | | | |
| Q9H4B7 | Tubulin beta-1 chain (SEQ ID | 3.6 | 3.4 | −1.1 | 1.1E−02 | 1.8E−02 | 8.8E−01 |
| | NO: 58) | | | | | | |
| Q14118 | Dystroglycan (SEQ ID NO: 71) | 4.5 | 2.7 | −1.7 | 3.9E−02 | | 5.1E−01 |
| P04040 | Catalase (SEQ ID NO: 72) | −1.8 | 2.4 | 4.3 | 3.5E−01 | 2.3E−02 | 4.9E−04 |
| P00738 | | | | | | | |
| P00739 | Haptoglobin, Haptoglobin | 2.2 | 2.1 | −1.0 | 2.9E−34 | 2.4E−32 | 6.9E−01 |
| | related protein (SEQ ID NO: 56) | | | | | | |
| P00915 | Carbonic anhydrase 1 (SEQ ID | 1.1 | 2.0 | 1.7 | 6.0E−01 | 2.5E−03 | 5.8E−03 |
| | NO: 73) | | | | | | |
| P05362 | Intercellular adhesion | 2.6 | 1.9 | −1.4 | 4.7E−02 | 2.5E−01 | 4.1E−01 |
| | molecule 1 (SEQ ID NO: 74) | | | | | | |
| P02787 | Serotransferrin (SEQ ID NO: 75) | 1.6 | 1.9 | 1.2 | 1.5E−10 | 1.1E−18 | 5.9E−03 |
| Q08380 | Galectin-3-binding protein | 1.9 | 1.9 | −1.0 | 1.7E−02 | 1.9E−02 | 9.6E−01 |
| | (SEQ ID NO: 76) | | | | | | |
| P62328 | Thymosin beta-4 (SEQ ID | −1.6 | 1.8 | 2.9 | 3.1E−01 | 9.3E−02 | 4.8E−03 |
| | NO: 59) | | | | | | |
| P02753 | Plasma retinol-binding protein | 1.9 | 1.7 | −1.1 | 7.5E−11 | 1.4E−08 | 3.5E−01 |
| | (SEQ ID NO: 29) | | | | | | |
| P01233 | Choriogonadotropin subunit | , | 1.7 | −1.0 | 6.5E−03 | 1.3E−02 | 8.0E−01 |
| | beta (SEQ ID NO: 8) | | | | | | |
| P32119 | Peroxiredoxin-2 (SEQ ID | −1.1 | 1.6 | 1.7 | 7.8E−01 | 5.8E−02 | 1.9E−02 |
| | NO: 77) | | | | | | |
| P09172 | Dopamine beta-hydroxylase | −1.3 | 1.3 | 1.7 | 2.8E−01 | 2.5E−01 | 1.7E−02 |
| | (SEQ ID NO: 51) | | | | | | |
| P20742 | Pregnancy zone protein (SEQ | −1.3 | 1.3 | 1.6 | 5.8E−01 | 2.5E−03 | 7.5E−10 |
| | ID NO: 28) | | | | | | |
| P07738 | Bisphosphoglycerate mutase | −3.6 | 1.2 | 4.2 | 9.2E−02 | 6.9E−01 | 2.1E−02 |
| | (SEQ ID NO: 78 | | | | | | |
| P08185 | Corticosteroid-binding | 1.6 | 1.1 | −1.4 | 3.3E−02 | 6.9E−01 | 5.9E−02 |
| | globulin (SEQ ID NO: 79 | | | | | | |
| P00918 | Carbonic anhydrase 2 (SEQ ID | −1.8 | 1.0 | 1.8 | 4.0E−02 | 9.4E−01 | 2.6E−02 |
| | NO: 80 | | | | | | |
| P18428 | Lipopolysaccharide-binding | 1.3 | −1.2 | −1.6 | 2.0E−01 | 4.3E−01 | 2.8E−02 |
| | protein (SEQ ID NO: 22) | | | | | | |
| P25054 | Adenomatous polyposis coli | 5.7 | −1.3 | −7.3 | 1.1E−02 | | 7.8E−03 |
| | protein (SEQ ID NO: 81) | | | | | | |
| P22064 | Latent-transforming growth | 4.6 | −1.3 | −5.8 | 9.5E−03 | | 3.4E−03 |
| | factor beta-binding (SEQ ID | | | | | | |
| | NO: 82) | | | | | | |
| P02671 | Fibrinogen alpha chain (SEQ | −2.3 | −1.3 | 1.8 | 5.0E−06 | 1.2E−01 | 1.6E−03 |
| | ID NO: 53) | | | | | | |
| P00740 | Coagulation factor IX (SEQ ID | −1.7 | −1.4 | 1.2 | 2.3E−03 | 2.7E−02 | 3.8E−01 |
| | NO: 83) | | | | | | |
| Q04756 | Hepatocyte growth factor | −1.6 | −1.5 | 1.1 | 3.1E−02 | 7.7E−02 | 6.8E−01 |
| | activator (SEQ ID NO: 84) | | | | | | |
| P02747 | Complement C1q | −1.8 | −1.5 | 1.2 | 6.3E−04 | 1.8E−02 | 2.7E−01 |
| | subcomponent subunit C (SEQ | | | | | | |
| | ID NO: 85) | | | | | | |
| P02746 | Complement C1q | −1.7 | −1.5 | 1.1 | 4.0E−03 | 1.9E−02 | 5.9E−01 |
| | subcomponent subunit B (SEQ | | | | | | |
| | ID NO: 86) | | | | | | |
| P49747 | Cartilage oligomeric matrix | −1.4 | −1.5 | −1.1 | 7.9E−02 | 2.6E−02 | 6.1E−01 |
| | protein (SEQ ID NO: 87) | | | | | | |
| P13796 | Plastin-2 (SEQ ID NO: 24) | −1.7 | −1.5 | 1.1 | 5.2E−03 | 2.6E−02 | 5.6E−01 |
| P04275 | von Willebrand factor (SEQ ID | −1.3 | −1.5 | −1.2 | 6.4E−03 | 5.0E−05 | 1.6E−01 |
| | NO: 37) | | | | | | |
| P60709, | Actin, cytoplasmic 1, Actin, | −1.3 | −1.6 | −1.2 | 4.2E−02 | 1.3E−03 | 2.1E−01 |
| P63267 | gamma-enteric smooth | | | | | | |
| | muscle (SEQ ID NO: 40), (SEQ | | | | | | |
| | ID NO: 88) | | | | | | |
| P10721 | Mast/stem cell growth factor | −3.1 | −1.6 | 2.0 | 3.9E−02 | 3.2E−01 | 2.2E−01 |
| | receptor (SEQ ID NO: 89) | | | | | | |
| P40197 | Platelet glycoprotein V (SEQ | −1.8 | −1.6 | 1.1 | 4.0E−02 | 8.7E−02 | 7.2E−01 |
| | ID NO: 90) | | | | | | |
| Q8WZ75 | Roundabout homolog 4 (SEQ | −7.5 | −1.8 | 4.3 | 6.9E−03 | 3.5E−01 | |
| | ID NO: 91) | | | | | | |
| Q16610 | Extracellular matrix protein 1 | −1.1 | −1.8 | −1.6 | 5.3E−01 | 4.5E−03 | 2.0E−02 |
| | (SEQ ID NO: 92) | | | | | | |
| P02745 | Complement C1q | −2.2 | −1.8 | 1.2 | 4.0E−02 | 1.1E−01 | 6.3E−01 |
| | subcomponent subunit A (SEQ | | | | | | |
| | ID NO: 93) | | | | | | |
| P55058 | Phospholipid transfer protein | −3.7 | −1.9 | 1.9 | 2.6E−02 | 2.0E−01 | 2.9E−01 |
| | (SEQ ID NO: 94) | | | | | | |
| Q76LX8 | ADAMTS-13 (SEQ ID NO: 95) | −1.5 | −1.9 | −1.3 | 2.0E−01 | 3.8E−02 | 4.1E−01 |
| P05155 | Plasma protease C1 inhibitor | −2.5 | −1.9 | 1.3 | 3.0E−12 | 9.1E−08 | 8.3E−02 |
| | (SEQ ID NO: 96) | | | | | | |
| Q13790 | Apolipoprotein F (SEQ ID | −1.6 | −2.2 | −1.4 | 2.1E−01 | 4.0E−02 | 3.9E−01 |
| | NO: 97) | | | | | | |
| Q99784 | Noelin (SEQ ID NO: 98) | −2.7 | −2.4 | 1.2 | 1.7E−02 | 3.6E−02 | 7.6E−01 |
| O75015 | Low affinity immunoglobulin | −1.4 | −3.1 | −2.1 | 4.4E−01 | 4.0E−02 | 2.3E−01 |
| | gamma Fc region receptor | | | | | | |
| | (SEQ ID NO: 99) | | | | | | |
| Q16208 | CD44 antigen (SEQ ID NO: 100) | −1.2 | −3.4 | −2.8 | 7.1E−01 | 2.3E−02 | 5.7E−02 |
| P22897 | Macrophage mannose | −2.2 | −4.1 | −1.9 | 1.9E−01 | 4.9E−02 | |
| | receptor 1 (SEQ ID NO: 101) | | | | | | |
| P01243 | Chorionic | −1.9 | −6.4 | −3.4 | 3.1E−01 | 2.3E−02 | |
| | somatomammotropin | | | | | | |
| | hormone (SEQ ID NO: 10) | | | | | | |
| P02675 | Fibrinogen beta chain (SEQ ID | −10.6 | −10.4 | 1.0 | 5.7E−04 | 6.2E−04 | |
| | NO: 102) | | | | | | |

[0130] Twenty three of these potential biomarkers were selected for further validation by immunoassay, based on statistical significance and/or potential clinical relevance. Measured protein concentrations from 169 subjects were log-transformed and compared between control and PE using an ANOVA test. The mean concentration of each protein in both groups was transformed back to original units (ng/ml, harmonic mean) for presentation. As summarized in Table 5a below, there were statistically significant differences in concentrations of 2 out of the 23 candidate proteins among women with and without PE. Complement factor D and Vascular cell adhesion protein 1 had significantly higher concentrations in maternal serum from women with PE. As seen in Table 5b, Pappalysin-1 was relatively low among women with PE in the comparison of severe PE and control.

TABLE 5a
Differences in 23 candidate protein biomarkers in serum samples from women in first
trimester with pre-eclampsia and without pre-eclampsia

| | Single Protein Comparisons | | |
|---|---|---|---|
| | Harmonic Mean Value for Each Group | | |
| | | | PE vs. No |
| | PE | No PE | PE |
| Protein | n = 73 | n = 96 | p-value* |
| Apolipoprotein A-II (SEQ ID NO: 43) | 424119.61 | 436347.53 | 0.4836 |
| Beta-2-microglobulin (SEQ ID NO: 45) | 1203.01 | 1102.85 | 0.0158 |
| Complement factor D (SEQ ID NO: 49) | 2201.04 | 1914.27 | [symbol] |
| Vasorin (SEQ ID NO: 34) | 7758.79 | 7061.72 | 0.0207 |
| Alpha-2-antiplasmin (SEQ ID NO: 39) | 1020.85 | 830.61 | 0.3814 |
| Apolipoprotein C-III (SEQ ID NO: 5) | 52994.68 | 52686.57 | 0.9151 |
| Vascular cell adhesion protein 1 (SEQ ID | 12415.61 | 10793.85 | [symbol] |
| NO: 60) | | | |
| Alpha-2-macroglobulin (SEQ ID NO: 62) | 1733583.31 | 1864547.21 | 0.233 |
| Pappalysin-1 (SEQ ID NO: 63) | 400.55 | 1935.27 | 0.0091 |
| Apolipoprotein B-100 (SEQ ID NO: 3) | 20721328.71 | 20942859.27 | 0.8119 |
| Cystatin-C (SEQ ID NO: 11) | 1558.57 | 1450.36 | 0.0033 |
| Endoglin (SEQ ID NO: 12) | 33.94 | 35.64 | 0.124 |
| Fibronectin (SEQ ID NO: 15) | 703148.86 | 685657.84 | 0.8633 |
| Plasma retinol-binding protein (SEQ ID NO: 29) | 21801.27 | 21941.98 | 0.8071 |
| Chorionic somatomammotropin hormone | 1775.39 | 2455.75 | 0.3207 |
| (SEQ ID NO: 10) | | | |
| Choriogonadotropin subunit beta (SEQ ID | 6010.62 | 5333.17 | 0.2031 |
| NO: 8) | | | |
| Vascular endothelial growth factor receptor 3 | 17.86 | 18.59 | 0.5362 |
| (SEQ ID NO: 35) | | | |
| Lipopolysaccharide-binding protein (SEQ ID | 44265.63 | 40592.77 | 0.3203 |
| NO: 22) | | | |
| Pregnancy-specific beta-1-glycoprotein 1 | 5177.94 | 5595.67 | 0.6162 |
| (SEQ ID NO: 26) | | | |
| Matrix metalloproteinase-9 (SEQ ID NO: 23) | 501.45 | 544.94 | 0.3783 |
| Cathepsin D (SEQ ID NO: 7) | 3372.27 | 3019.25 | 0.4423 |
| C-reactive protein (SEQ ID NO: 64) | 1760.81 | 1483.24 | 0.2994 |
| Serum amyloid P-component (SEQ ID NO: 65) | 24406.15 | 23469.36 | 0.4374 |

p-value from one-way analysis of variance are on log-transformed data. Bold italics indicate statistically
significant differences between groups after Bonferroni adjustment for multiple comparisons applied

TABLE 5b
Differences in 23 candidate protein biomarkers in serum samples from women in first
trimester with severe pre-eclampsia compared to controls

| | Single Protein Comparisons | | |
|---|---|---|---|
| | Harmonic Mean Value for Each Group | | |
| | | | Severe PE |
| | Severe PE | Control | vs. Control |
| Protein | n = 40 | n = 96 | p-value* |
| Apolipoprotein A-II (SEQ ID NO: 43) | 414589.35 | 436347.53 | 0.3113 |
| Beta-2-microglobulin (SEQ ID NO: 45) | 1221.49 | 1102.85 | 0.0238 |
| Complement factor D (SEQ ID NO: 49) | 2125.16 | 1914.27 | 0.0209 |
| Vasorin (SEQ ID NO: 34) | 7356.94 | 7061.72 | 0.3956 |
| Alpha-2-antiplasmin (SEQ ID NO: 39) | 972.32 | 830.61 | 0.6003 |
| Apolipoprotein C-III (SEQ ID NO: 5) | 51238.62 | 52686.57 | 0.6669 |
| Vascular cell adhesion protein 1 (SEQ ID | 11978.60 | 10793.85 | 0.0355 |
| NO: 60) | | | |
| Alpha-2-macroglobulin (SEQ ID NO: 62) | 1804294.11 | 1864547.21 | 0.4176 |
| Pappalysin-1 (SEQ ID NO: 63) | 181.32 | 1935.27 | [symbol] |
| Apolipoprotein B-100 (SEQ ID NO: 3) | 21038246.48 | 20942859.27 | 0.9344 |
| Cystatin-C (SEQ ID NO: 11) | 1569.99 | 1450.36 | 0.0099 |
| Endoglin (SEQ ID NO: 12) | 33.72 | 35.64 | 0.1623 |
| Fibronectin (SEQ ID NO: 15) | 779801.36 | 685657.84 | 0.4855 |
| Plasma retinol-binding protein (SEQ ID NO: 29) | 21146.57 | 21941.98 | 0.2714 |
| Chorionic somatomammotropin hormone | 1387.86 | 2455.75 | 0.1938 |
| (SEQ ID NO: 10) | | | |
| Choriogonadotropin subunit beta (SEQ ID | 5490.13 | 5333.17 | 0.8047 |
| NO: 8) | | | |
| Vascular endothelial growth factor receptor 3 | 18.08 | 18.59 | 0.7254 |
| (SEQ ID NO: 35) | | | |
| Lipopolysaccharide-binding protein (SEQ ID | 41060.55 | 40592.77 | 0.9814 |
| NO: 22) | | | |
| Pregnancy-specific beta-1-glycoprotein 1 | 5047.31 | 5595.67 | 0.5611 |
| (SEQ ID NO: 26) | | | |
| Matrix metalloproteinase-9 (SEQ ID NO: 23) | 458.81 | 544.94 | 0.7635 |
| Cathepsin D (SEQ ID NO: 7) | 3261.59 | 3019.25 | 0.7213 |
| Serum amyloid P-component (SEQ ID NO: 65) | 24046.97 | 23469.36 | 0.5732 |
| C-reactive protein (SEQ ID NO: 64) | 1994.80 | 1483.24 | 0.1215 |

[0131] Simple logistic regression models (Hosmer and Lemeshow 2000) with a binary dependent variable designating PE status (1=PE n=60, 0=Control n=58) were fit for each biomarker individually. The predicted values from these models were used to create Receiver Operating Characteristic (ROC) curves (Pepe 2003). ROC curves are plots of the true positive fraction of a test (sensitivity) versus the false positive fraction (1-specificity) across the entire continuum of observed values. The area under the curve should be between 0.5 (poor discriminant) to 1.0 (perfect discriminant), and can be expressed probabilistically as the probability that a randomly selected pair of PE and control subjects is correctly classified. Standard errors for the AUROC were conducted based on percentiles of bootstrapped distributions (Pepe 2003).

[0132] Table 6a summarizes the area under the entire receiver operating characteristic curve (AUROC) and 95% confidence intervals (CI) for the 23 potential biomarkers for classifying samples with PE (n=73) or without PE (n=96). Complement factor D (AUROC 0.67, 95% CI 0.59-0.75) and Pappalysin-1 (AUROCs of 0.66, 0.65) showed good classification ability. A Six-analyte model including Vascular cell adhesion protein 1, Endoglin, Complement factor D, Pappalysin-1, Choriogonadotropin subunit beta and Plasma retinol-binding protein had an improved AUROC of 0.77 (95% CI 0.70-0.84).

TABLE 6a
Performance of 23 candidate protein biomarkers, individually and in combination, for
classifying samples with or without pre-eclampsia

| | | |
|---|---|---|
| | Area Under ROC | 95% CI for |
| Marker | Curve (AUROC) | AUROC |

Individual Proteins

| | | |
|---|---|---|
| Apolipoprotein A-II (SEQ ID NO: 43) | 0.535 | (0.45-0.62) |
| Beta-2-microglobulin (SEQ ID NO: 45) | 0.604 | (0.52-0.69) |
| Complement factor D (SEQ ID NO: 49) | 0.669 | (0.59-0.75) |
| Vasorin (SEQ ID NO: 34) | 0.599 | (0.51-0.69) |
| Alpha-2-antiplasmin (SEQ ID NO: 39) | 0.514 | (0.45-0.62) |
| Apolipoprotein C-III (SEQ ID NO: 5) | 0.500 | (0.41-0.59) |
| Vascular cell adhesion protein 1 (SEQ ID NO: 60) | 0.653 | (0.57-0.74) |
| Alpha-2-macroglobulin (SEQ ID NO: 62) | 0.544 | (0.45-0.63) |
| Pappalysin-1 (SEQ ID NO: 63) | 0.663 | (0.58-0.75) |
| Apolipoprotein B-100 (SEQ ID NO: 3) | 0.517 | (0.43-0.61) |
| Cystatin-C (SEQ ID NO: 11) | 0.620 | (0.53-0.71) |
| Endoglin (SEQ ID NO: 12) | 0.576 | (0.49-0.66) |
| Fibronectin (SEQ ID NO: 15) | 0.515 | (0.42-0.60) |
| Plasma retinol-binding protein (SEQ ID NO: 29) | 0.505 | (0.42-0.59) |
| Chorionic somatomammotropin hormone (SEQ ID | 0.652 | (0.57-0.73) |
| NO: 10) | | |
| Choriogonadotropin subunit beta (SEQ ID NO: 8) | 0.532 | (0.44-0.62) |
| Vascular endothelial growth factor receptor 3 | 0.529 | (0.44-0.62) |
| (SEQ ID NO: 35) | | |
| Lipopolysaccharide-binding protein (SEQ ID | 0.541 | (0.45-0.63) |
| NO: 22) | | |
| Pregnancy-specific beta-1-glycoprotein 1 (SEQ ID | 0.621 | (0.54-0.71) |
| NO: 26) | | |
| Matrix metalloproteinase-9 (SEQ ID NO: 23) | 0.552 | (0.46-0.64) |
| Cathepsin D (SEQ ID NO: 7) | 0.544 | (0.45-0.63) |
| C-reactive protein (SEQ ID NO: 64) | 0.553 | (0.46-0.64) |
| Serum amyloid P-component (SEQ ID NO: 65) | 0.527 | (0.44-0.62) |

Protein Combinations

| | | |
|---|---|---|
| VCAM1 + Endoglin | 0.704 | (0.62-0.78) |
| VCAM1 + Endoglin + CFAD | 0.731 | (0.65-0.81) |
| VCAM1 + Endoglin + HCG + PAPPA1 | 0.749 | (0.67-0.82) |
| VCAM1 + Endoglin + HCG + PAPPA1 + CFAD | 0.756 | (0.68-0.83) |
| VCAM1 + Endoglin + HCG + PAPPA1 + CFAD + RBP | 0.771 | (0.70-0.84) |

[0133] Table 6b summarizes AUROC and 95% confidence intervals (CI) for 23 potential biomarkers for classifying samples with severe PE (n=40) versus control (n=96). Pappalysin-1 had the best classification performance (AUROC 0.68, 95% CI 0.58-0.79). A Five-analyte model including Pappalysin-1, C-reactive protein, Plasma retinol-binding protein, Beta-2-microglobulin and Vascular cell adhesion protein 1 had an improved AUROC of 0.75 (95% CI 0.68-0.83).

TABLE 6b
Performance of 23 candidate protein biomarkers,
individually and in combination, for classifying samples
with severe pre-eclampsia versus control

| | | |
|---|---|---|
| | Area Under | |
| | ROC Curve | 95% CI for |
| Marker | (AUROC) | AUROC |

Individual Proteins

| | | |
|---|---|---|
| Apolipoprotein A-II (SEQ ID NO: 43) | 0.556 | (0.45-0.67) |
| Beta-2-microglobulin (SEQ ID NO: 45) | 0.614 | (0.52-0.72) |
| Complement factor D (SEQ ID NO: 49) | 0.620 | (0.52-0.72) |
| Vasorin (SEQ ID NO: 34) | 0.536 | (0.43-0.64) |
| Alpha-2-antiplasmin (SEQ ID NO: 39) | 0.507 | (0.40-0.62) |
| Apolipoprotein C-III (SEQ ID NO: 5) | 0.526 | (0.43-0.64) |
| Vascular cell adhesion protein 1 (SEQ ID | 0.613 | (0.52-0.72) |
| NO: 60) | | |
| Alpha-2-macroglobulin (SEQ ID NO: 62) | 0.524 | (0.43-0.64) |
| Pappalysin-1 (SEQ ID NO: 63) | 0.684 | (0.58-0.79) |
| Apolipoprotein B-100 (SEQ ID NO: 3) | 0.511 | (0.42-0.61) |
| Cystatin-C (SEQ ID NO: 11) | 0.615 | (0.52-0.72) |
| Endoglin (SEQ ID NO: 12) | 0.582 | (0.49-0.69) |
| Fibronectin (SEQ ID NO: 15) | 0.566 | (0.47-0.78) |
| Plasma retinol-binding protein | 0.552 | (0.45-0.56) |
| (SEQ ID NO: 29) | | |
| Chorionic somatomammotropin hormone | 0.671 | (0.57-0.78) |
| (SEQ ID NO: 10) | | |
| Choriogonadotropin subunit beta | 0.490 | (0.40-0.61) |
| (SEQ ID NO: 8) | | |
| Vascular endothelial growth factor receptor 3 | 0.512 | (0.42-0.61) |
| (SEQ ID NO: 35) | | |
| Lipopolysaccharide-binding protein | 0.470 | (0.46-0.67) |
| (SEQ ID NO: 22) | | |
| Pregnancy-specific beta-1-glycoprotein 1 | 0.644 | (0.54-0.75) |
| (SEQ ID NO: 26) | | |
| Matrix metalloproteinase-9 | 0.541 | (0.44-0.64) |
| (SEQ ID NO: 23) | | |
| Cathepsin D (SEQ ID NO: 7) | 0.525 | (0.43-0.64) |
| Serum amyloid P-component | 0.522 | (0.42-0.63) |
| (SEQ ID NO: 65) | | |
| C-reactive protein (SEQ ID NO: 64) | 0.594 | (0.49-0.69) |

Protein Combinations

| | | |
|---|---|---|
| PAPPA1 + CRP | 0.712 | (0.62-0.81) |
| PAPPA + CRP + RBP | 0.726 | (0.63-0.82) |
| PAPPA + CRP + RBP + B2MG | 0.732 | (0.64-0.82) |

[0134] 2. Discussion

[0135] We have utilized two comprehensive proteomic techniques to characterize maternal serum proteins among a cohort of women with and without PE.

[0136] Throughout the foregoing description the invention has been discussed with reference to certain embodiments, but it is not so limited. Indeed, various modifications of the invention in addition to those shown and described herein will become apparent to those skilled in the art from the foregoing description and fall within the scope of the appended claims.

[0137] All references cited throughout the description, and the references cited therein, are hereby expressly incorporated by reference in their entirety.

### Example 3

### Maternal Serum Biomarkers of Gestational Hypertension Distinct from Pre-Eclampsia

[0138] Study Design: To characterize maternal serum proteome profile in gestational hypertension (GH), or pregnancy induced hypertension (PIH), a total of 130 women from a prospective observational cohort were included in this study. Maternal serum samples were collected between 21 and 37 gestational weeks. GH and preeclampsia were classified by Working Group criteria (Am J Obstet Gynecol 2000; 183). Maternal serum proteome analysis was performed using multidimensional liquid chromatography tandem mass spectrometry (2D LC-MS/MS) and label-free quantification (spectral counting). Pair-wise comparison was performed using ×2 goodness-of-fit tests and adjusted for multiple comparisons via the false-discovery rate (FDR) method. Immunoassays were used for accurate quantification and evaluated using the Receiver Operating Characteristic (ROC) curves and logistic regression analysis.

[0139] Results: 14 women developed GH at a mean of 32 weeks gestation, 29 developed mild PE (mean 35 weeks), 29 developed severe PE (mean 31 weeks), and 58 remained normotensive and delivered at term. 2D-LC-MS-MS analysis of maternal sera identified 480 unique proteins for label-free quantification. Cluster analysis showed a unique cluster of proteins differentially expressed in PIH distinct from mild and severe PE. Label-free quantification identified 36 differentially expressed (p<0.05) proteins between patients with GH compared to PE. These included cytoskelatal proteins (talin, filamin A, tropomyosin alpha, actin aortic smooth muscle); placental proteins (PAPPA-2, HCG); and matrix proteins. Analysis of 17 potential biomarkers with specific immunoassays showed good discriminating capability between GH and PE (AUROC's 0.73 to 0.82). Multi-analyte analysis showed further increased the discriminant ability (AUROC>0.88).

TABLE 7
Serum proteins sharing significant changes between Pair-wise comparisons of
gestational hypertension, control, mild PE and severe PE samples

| | | Fold Change | | | Significance | | |
|---|---|---|---|---|---|---|---|
| | | GH | GH vs. | GH vs. | GH vs. | GH vs. | GH vs. |
| Swiss-Prot | | vs. | Mild PE | Severe | Control | Mild PE | Severe |
| Accession | Description | Control | levis | PE | P-val | P-val | PE P-val |
| P01034 | Cystatin-C (SEQ ID NO: 11) | 11.07 | 1.71 | 1.06 | 0.000 | 0.199 | 0.893 |
| P02763 | Alpha-1-acid glycoprotein 1 (SEQ ID NO: 104) | 5.22 | 5.33 | 1.36 | 0.028 | 0.027 | 0.742 |
| P61769 | Beta-2-microglobulin [Contains: Beta-2- | 5.22 | −1.09 | −1.15 | 0.028 | 0.844 | 0.729 |
| | microglobulin varian pl 5.3] (SEQ ID NO: 45) | | | | | | |
| P07339 | Cathepsin D (SEQ ID NO: 7) | 5.22 | 1.07 | −1.29 | 0.028 | 0.920 | 0.553 |
| P07942 | Laminin subunit beta-1 (SEQ ID NO: 21) | 3.55 | 1.39 | −2.73 | | | 0.041 |
| P17813 | Endoglin (SEQ ID NO: 12) | 2.71 | 2.77 | −3.84 | | | 0.009 |
| Q8IV18 | Fibronectin (SEQ ID NO: 15) | 2.09 | 1.01 | −5.22 | 0.000 | 0.894 | 0.000 |
| Q6EMK4 | Vasorin (SEQ ID NO: 34) | 2.03 | −1.28 | −1.40 | 0.217 | 0.550 | 0.391 |
| P01243 | Chorionic somatomammotropin hormone (SEQ | −2.00 | 1.44 | 1.09 | 0.009 | 0.283 | 0.808 |
| | ID NO: 10) | | | | | | |
| Q9H299 | SH3 domain binding glutamic acid-rich-like | −2.24 | −1.48 | 4.80 | 0.120 | 0.551 | |
| | protein 3 (SEQ ID NO: 30) | | | | | | |
| P33151 | Cadherin-5 (SEQ ID NO: 105) | −2.42 | −1.83 | −1.21 | 0.078 | 0.270 | 0.759 |
| P21333 | Filamin-A (SEQ ID NO: 16) | −2.48 | −2.57 | 12.12 | 0.003 | 0.002 | 0.000 |
| P07737 | Profilin-1 (SEQ ID NO: 25) | −2.55 | −2.50 | 3.61 | 0.006 | 0.007 | 0.030 |
| P07359 | Platelet glycoprotein lb alpha chain (SEQ ID | −2.76 | −1.82 | −3.55 | 0.058 | 0.346 | 0.009 |
| | NO: 55) | | | | | | |
| P02743 | Serum amyloid P-component (SEQ ID NO: 65) | −2.80 | 5.33 | −3.11 | 0.014 | 0.027 | 0.005 |
| P04075 | Fructose-bisphosphate aldolase A (SEQ ID | −2.95 | −1.39 | 1.68 | 0.009 | 0.472 | 0.486 |
| | NO: 106) | | | | | | |
| P37802 | Transgelin-2 (SEQ ID NO: 31) | −2.95 | −2.29 | 5.72 | 0.009 | 0.054 | 0.022 |
| P18206 | Vinculin (SEQ ID NO: 36) | −2.99 | −1.60 | 1.14 | 0.036 | 0.510 | |
| Q9NQ79 | Cartilage acidic protein 1 (SEQ ID NO: 50) | −3.21 | −2.49 | −1.29 | 0.022 | 0.094 | 0.731 |
| Q86SQ4 | Probable G-protein couple receptor 126 (SEQ | −3.26 | 1.07 | −4.37 | | | 0.065 |
| | ID NO: 107) | | | | | | |
| P13796 | Plastin-2 (SEQ ID NO: 24) | −3.31 | −1.00 | −1.12 | 0.000 | 0.977 | 0.715 |
| P67936 | Tropomyosin alpha-4 chain (SEQ ID NO: 33) | −3.33 | −4.70 | 4.80 | 0.007 | 0.000 | |
| Q6P3U9 | 14-3-3 protein zeta/delta (SEQ ID NO: 108) | −3.61 | −2.38 | 2.97 | 0.023 | 0.182 | |
| P23528 | Cofilin-1 (SEQ ID NO: 109) | −4.79 | −5.45 | 1.14 | 0.063 | 0.032 | |
| P04406 | Glyceraldehyde-3-phosphate dehydrogenase | −4.79 | 1.07 | 1.14 | 0.063 | | |
| | (SEQ ID NO: 110) | | | | | | |
| Q9UJJ9 | N-acetylglucosamine-1-phosphotransferase | −4.79 | −6.20 | 3.67 | 0.063 | 0.016 | |
| | subunit gamma (SEQ ID NO: 111) | | | | | | |
| P23470 | Receptor-type tyrosine-protein phosphatase | −4.79 | 1.07 | 1.14 | 0.063 | | |
| | gamma (SEQ ID NO: 27) | | | | | | |
| P12814 | Alpha-actinin-1 (SEQ ID NO: 112) | −5.56 | 1.07 | 1.14 | 0.031 | | |
| P04040 | Catalase (SEQ ID NO: 72) | −5.56 | 1.07 | 1.14 | 0.031 | | |
| P55058 | Phospholipid transfer protein (SEQ ID NO: 94) | −5.56 | −2.44 | 1.14 | 0.031 | | |
| P18669 | Phosphoglycerate mutase 1 (SEQ ID NO: 113) | −6.32 | 1.07 | 1.14 | 0.016 | | |
| P32119 | Peroxiredoxin-2 (SEQ ID NO: 77) | −6.32 | −3.94 | 1.14 | 0.016 | | |
| Q86YW5 | Trem-like transcript 1 protein (SEQ ID NO: 114) | −6.32 | 1.07 | 1.14 | 0.016 | | |
| P01233 | Choriogonadotropin subunit beta (SEQ ID | −7.09 | 1.07 | −15.58 | 0.008 | | 0.000 |
| | NO: 8) | | | | | | |
| P09211 | Glutathione S-transferase P (SEQ ID NO: 115) | −7.09 | −3.94 | 1.14 | 0.008 | | |
| Q9UIQ6 | Leucyl-cystinyl aminopeptidase (SEQ ID | −7.09 | −4.69 | −2.27 | 0.008 | 0.063 | |
| | NO: 116) | | | | | | |
| P35916 | Vascular endothelial growth factor receptor 3 | −7.86 | 1.07 | 1.14 | 0.004 | | |
| | (SEQ ID NO: 35) | | | | | | |
| Q01518 | Adenylyl cyclase-associated protein 1 (SEQ ID | −8.62 | −5.45 | 1.14 | 0.002 | 0.032 | |
| | NO: 117) | | | | | | |
| P14780 | Matrix metalloproteinase-9 (SEQ ID NO: 23) | −8.62 | −4.69 | −2.27 | 0.002 | 0.063 | |
| P62937 | Peptidyl-prolyl cis-trans isomerase A (SEQ ID | −8.62 | 1.07 | 1.14 | 0.002 | | |
| | NO: 118) | | | | | | |
| P29401 | Transketolase (SEQ ID NO: 119) | −8.62 | −4.69 | 1.14 | 0.002 | 0.063 | |
| P00558 | Phosphoglycerate kinase 1 (SEQ ID NO: 120) | −10.16 | −3.19 | 1.14 | 0.001 | | |
| P62736 | Actin, aeortic smooth muscle (SEQ ID NO: 2) | −100.83 | −88.23 | −36.59 | 0.000 | 0.000 | 0.000 |

TABLE 8
Maternal serum biomarkers to identify women with gestational hypertension (GH) or
pregnancy induced hypertension (PIH).

| | Geometric Mean Value for Each Group | | | | | | | | | |
|---|---|---|---|---|---|---|---|---|---|---|
| | Control | GH | Mild PE | Severe PE | Severe PE vs. GH | | Mild PE vs. GH | | GH vs. Control | |
| Protein | n = 58 | n = 14 | n = 30 | n = 30 | p-value | AUROC | p-value | AUROC | p-value | AUROC |
| Apolipoprotein B-100 | 24945198 | 17814400 | 18564173 | 17917397 | 0.9773 | 0.522 | 0.8211 | 0.562 | 0.0094 | 0.754 |
| Cystatin-C | 1651 | 1882 | 2191 | 2044 | 0.5049 | 0.627 | 0.0712 | 0.696 | 0.0799 | 0.641 |
| Endoglin | 55 | 59 | 87 | 108 | 0.0021 | 0.867 | 0.0152 | 0.748 | 0.4618 | 0.571 |
| Fibronectin | 228002 | 790374 | 802851 | 1297003 | 0.0135 | 0.781 | 0.9529 | 0.585 | 0.0006 | 0.901 |
| Plasma retinol-binding protein | 17573 | 19203 | 17835 | 23655 | 0.0648 | 0.714 | 0.5564 | 0.528 | 0.2954 | 0.586 |
| Apolipoprotein C-III | 92501 | 128529 | 121850 | 153721 | 0.1905 | 0.629 | 0.719 | 0.526 | 0.0145 | 0.708 |
| Chorionic somatomammotropin | 59321 | 42787 | 56699 | 29239 | 0.1892 | 0.606 | 0.1578 | 0.585 | 0.0799 | 0.665 |
| hormone | | | | | | | | | | |
| Choriogonadotropin subunit beta | 996 | 947 | 1726 | 1883 | 0.0247 | 0.728 | 0.0369 | 0.724 | 0.8573 | 0.526 |
| Pappalysin-2 | 99 | 129 | 681 | 791 | 0.0139 | 0.808 | 0.0275 | 0.767 | 0.6637 | 0.62 |
| Vascular endothelial growth factor | 60 | 42 | 65 | 40 | 0.7937 | 0.490 | 0.0865 | 0.713 | 0.1201 | 0.645 |
| receptor 3 | | | | | | | | | | |
| Histidine-rich glycoprotein | 161982 | 260038 | 184359 | 265494 | 0.9069 | 0.527 | 0.0703 | 0.664 | 0.0202 | 0.712 |
| Insulin-like growth factor-binding | 91 | 90 | 105 | 115 | 0.1382 | 0.691 | 0.1632 | 0.658 | 0.9633 | 0.525 |
| protein 2 | | | | | | | | | | |
| Matrix metalloproteinase-9 | 447 | 262 | 239 | 217 | 0.5451 | 0.532 | 0.6681 | 0.559 | 0.0155 | 0.712 |
| Pregnancy-specific beta-1- | 32534 | 29637 | 39739 | 32440 | 0.6555 | 0.592 | 0.055 | 0.675 | 0.4679 | 0.558 |
| glycoprotein 1 | | | | | | | | | | |
| C-reactive protein | 1203 | 1700 | 1070 | 1338 | 0.4683 | 0.570 | 0.1916 | 0.653 | 0.2214 | 0.629 |
| Vascular endothelial growth factor | 5 | 10 | 18 | 20 | 0.0546 | 0.805 | 0.0864 | 0.74 | 0.011 | 0.764 |
| receptor 1 | | | | | | | | | | |

[0140] Conclusions: Systematic and comprehensive maternal serum proteome analyses identified a multi-analyte panel of serum biomarkers for GH. Reliable diagnosis of GH that could distinguish from PE could facilitate early intervention strategies.

### Example 4

### Maternal Serum Biomarkers of Placental Insufficiency in Pre-Eclampsia

[0141] Objective: Preeclampsia (PE) and fetal growth restriction are associated with placental insufficiency. The early prediction of placental insufficiency associated with PE may lead to novel, early interventions to prevent fetal growth restriction. We sought to characterize maternal serum biomarkers of placental insufficiency associated with PE by proteomic analysis.

[0142] Methods: This was a secondary analysis of 57 women who developed PE from whom maternal sera was obtained between 21 and 37 weeks gestation as part of a large cohort study. None had PE at the time of sera collection. PE was defined as mild or severe following ACOG classification. Placental insufficiency was determined by umbilical artery Doppler criteria. Maternal serum proteome analysis was performed using multidimensional liquid chromatography tandem mass spectrometry (2D LC-MS/MS) and label-free quantification (spectral counting). Immunoassays were used for accurate quantification and evaluated using the Receiver Operating Characteristic (ROC) curves and logistic regression analysis.

[0143] Results: 30 patients developed mild PE and 27 developed severe PE. 13 women (12 subjects with severe PE and 1 subject with mild PE) had placental insufficiency. As shown in Table 9 below, analysis of 17 differentially expressed protein biomarkers for PE by specific immunoassay revealed 2 biomarkers with discriminant capability between those with and without placental insufficiency. PE subjects with placental insufficiency had decreased levels of chorionic somatomamotrophin1 (p-value 0.007) and pregnancy specific glycoprotein 1 (p-value 0.03) compared to women without placental insufficiency. The majority of other potential biomarkers of PE did not correlate with placental insufficiency.

TABLE 9
Role of pre-eclampsia biomarkers to distinguish PE women with and without placental
insufficiency

| | Geometric Mean Value for Each Group | | | |
|---|---|---|---|---|
| | | | PE with | Area |
| | PE with | PE without | placenta | Under |
| | placenta | placenta | insufficiency vs. | ROC |
| | insufficiency | insufficiency | without | Curve |
| Protein | n = 13 | n = 44 | p-value | (AUROC) |
| Apolipoprotein B-100 | 12119775 | 17044931 | 0.0623 | 0.646 |
| Cystatin-C | 1936 | 2160 | 0.3334 | 0.556 |
| Endoglin | 115 | 85 | 0.0512 | 0.670 |
| Fibronectin | 1524452 | 1143701 | 0.0659 | 0.669 |
| Plasma retinol-binding protein | 22099 | 20380 | 0.5171 | 0.519 |
| Apolipoprotein C-III | 129787 | 144605 | 0.4459 | 0.596 |
| Chorionic somatomammotropin | 19537 | 44991 | 0.0072 | 0.702 |
| hormone | | | | |
| Choriogonadotropin subunit beta | 2034 | 1459 | 0.2658 | 0.578 |
| Pappalysin-2 | 811 | 532 | 0.4208 | 0.514 |
| Vascular endothelial growth | 33 | 54 | 0.0646 | 0.613 |
| factor receptor 3 | | | | |
| Histidine-rich glycoprotein | 307693 | 246683 | 0.1629 | 0.660 |
| Insulin-like growth factor-binding | 123 | 102 | 0.1761 | 0.643 |
| protein 2 | | | | |
| Matrix metalloproteinase-9 | 274 | 223 | 0.3359 | 0.598 |
| Pregnancy-specific beta-1- | 25615 | 39524 | 0.0313 | 0.679 |
| glycoprotein 1 | | | | |
| C-reactive protein | 1134 | 1300 | 0.6876 | 0.518 |
| Vascular endothelial growth | 18 | 19 | 0.8587 | 0.526 |
| factor receptor 1 | | | | |

[0144] Conclusion: Placental insufficiency in PE does not correlate with biomarkers associated with the pathophysiology of active PE disease. Reliable diagnosis of placental insufficiency using maternal serum biomarkers in early gestation could facilitate new intervention strategies.

### REFERENCES

[0145] Altman, D., et al. Do women with pre-eclampsia, and their babies, benefit from magnesium sulphate? The Magpie Trial: a randomised placebo-controlled trial. Lancet, 2002. 359(9321): 1877-90.
[0146] Chappell L C, Seed P T, Briley A L, et al. Effect of antioxidants on the occurrence of preeclampsia in women at increased risk: a randomized trial. Lancet 1999; 354: 810-816.
[0147] Conde-Agudelo A, Villar J, Lindheimer M. World Health Organization systemic review of screening tests for preeclampsia. Obstet Gynecol 2004; 104: 1367-91.
[0148] Duley L, Henderson-Smart D J, Meher S, King J F. Antiplatelet agents for preventing pre-eclampsia and its complications. Cochrane Database Sys Rev. 2007; 2: CD004659.
[0149] Levine R J, Lam C, Qian C, Yu K F, Maynard S E, Sachs B P, et al. Soluble endoglin and other circulating antiangiogenic factors in preeclampsia. N Engl J Med 2006; 355: 992-1005.
[0150] Maynard, S. E., et al. Excess placental soluble fms-like tyrosine kinase 1 (sFlt1) may contribute to endothelial dysfunction, hypertension, and proteinuria in preeclampsia. J Clin Invest, 2003. 111(5): 649-58.
[0151] Polliotti B M, Fry G, Saller D N Jr., Mooney R A, Cox C, Miller R K. Second-trimester maternal serum placental growth factor and vascular endothelial growth factor for predicting severe, early-onset preeclampsia. 2003; 101: 1266-74.
[0152] Rasanen J, Tolosa J E, Girsen A, et al. Prediction of preeclampsia during early gestation using proteomic analysis of maternal serum. Am J Obstet. Gynecol. 2006; 195(S): S145
[0153] Roberts, J. M., et al., Summary of the NHLBI Working Group on Research on Hypertension During Pregnancy. Hypertension, 2003. 41(3): 437-45.
[0154] Rumbold A R, Crowther C A, Haslam R R, et al. Vitamins C and E and the risks of preeclampsia and perinatal complications. N Engl J. Med. 2006; 354 1796-806.
[0155] Rumbold A, Duley L, Crowther C, Haslam R. Antioxidants for preventing pre-eclampsia. Cochrane Database Sys Rev. 2005; 4: CD004227.
[0156] Sibai, B. M. and J. R. Barton. Expectant management of severe preeclampsia remote from term: patient selection, treatment, and delivery indications. Am J Obstet Gynecol, 2007. 196(6): 514 e1-9.
[0157] Solomon, C. G. and E. W. Seely, Hypertension in pregnancy. Endocrinol Metab Clin North Am, 2006. 35(1): 157-71, vii.
[0158] Villar J, Abdel-Aleem H, Merialdi M, et al. World Health Organization randomized trial of calcium supplementation among low calcium intake pregnant women. Am J Obstet Gynecol. 2006; 194: 639-49.
[0159] Pereira, L., A. P. Reddy, et al. (2007). “Identification of novel protein biomarkers of preterm birth in human cervical-vaginal fluid.” J Proteome Res 6(4): 1269-76.
[0160] Gravett, M. G., A. Thomas, et al. (2007). “Proteomic analysis of cervical-vaginal fluid: identification of novel biomarkers for detection of intra-amniotic infection.” J Proteome Res 6(1): 89-96.
[0161] Pang, J. X., N. Ginanni, et al. (2002). “Biomarker discovery in urine by proteomics.” J Proteome Res 1(2): 161-9.
[0162] Nagalla, S. R., J. A. Canick, et al. (2007). “Proteomic analysis of maternal serum in down syndrome: identification of novel protein biomarkers.” J Proteome Res 6(4): 1245-57.
[0163] Zybailov, B., A. L. Mosley, et al. (2006). “Statistical analysis of membrane proteome expression changes in Saccharomyces cerevisiae.” J Proteome Res 5(9): 2339-47.
[0164] Clark, M. F. and A. N. Adams (1977). “Characteristics of the microplate method of enzyme-linked immunosorbent assay for the detection of plant viruses.” J Gen Virol 34(3): 475-83.
[0165] Nerurkar, L. S., M. Namba, et al. (1984). “Rapid detection of herpes simplex virus in clinical specimens by use of a capture biotin-streptavidin enzyme-linked immunosorbent assay.” J Clin Microbiol 20(1): 109-14.
[0166] Old, W. M., K. Meyer-Arendt, et al. (2005). “Comparison of label-free methods for quantifying human proteins by shotgun proteomics.” Mol Cell Proteomics 4(10): 1487-502.
[0167] Hosmer D W and Lemeshow S. (2000) Applied Logistic Regression (2^{nd} Ed). John Wiley and Sons.
[0168] Pepe M S. (2003) The Statistical Evaluation of Medical Tests for Classification and Prediction. Oxford Univ Press.
[0169] Pepe M S. (2003) Chapter 5: Estimating the ROC Curve. The Statistical Evaluation of Medical Tests for Classification and Prediction. Oxford Univ Press.

1. A method for the diagnosis of active pre-eclampsia in a pregnant female mammalian subject comprising:
(a) testing in a maternal serum sample obtained from said subject the level of two or more proteins selected from the group consisting of apolipoprotein C-III (P02656), choriogonadotropin subunit beta (P1233), cystatin-C (P01034), endoglin (P17813), fibronectin (Q8IVI8), matrix metalloproteinase-9 (P14780), and pappalysin-2 (Q9BXP8), relative to the level in normal maternal serum or maternal serum known to be indicative of pre-eclampsia; and
(b) diagnosing said subject with pre-eclampsia if said level is determined to show a statistically significant difference relative to the level in said normal maternal serum, or is determined not to show a statistically significant difference relative to the level in said maternal serum known to be indicative of pre-eclampsia.

2. The method of claim 1 wherein the subject is a human patient.

3. The method of claim 2, wherein said testing is implemented using an apparatus adapted to determine the level of said proteins.

4. The method of claim 2, wherein said testing is performed by using a software program executed by a suitable processor.

5. The method of claim 4, wherein the program is embodied in software stored on a tangible medium.

6. The method of claim 5 wherein the tangible medium is selected from the group consisting of a flash drive, a CD-ROM, a floppy disk, a hard drive, a DVD, and a memory associated with the processor.

7. The method of any one of claims 2 to 6, further comprising the step of preparing a report recording the results of said testing or the diagnosis.

8. The method of claim 7 wherein said report is recorded or stored on a tangible medium.

9. The method of claim 8 wherein the tangible medium is paper.

10. The method of claim 8 wherein the tangible medium is selected from the group consisting of a flash drive, a CD-ROM, a floppy disk, a hard drive, a DVD, and a memory associated with the processor.

11. The method of any one of claims 2 to 6, further comprising the step of communicating the results of said diagnosis to an interested party.

12. The method of claim 11 wherein the interested party is the patient or the attending physician.

13. The method of claim 11 wherein the communication is in writing, by email, or by telephone.

14. The method of claim 2 comprising testing the abundance of at least three of said proteins.

15. The method of claim 2 comprising testing the abundance of at least four of said proteins.

16. The method of claim 2 comprising testing the level of proteins fibronectin (Q8IVI8), choriogonadotropin subunit beta (P1233), matrix metalloproteinase-9 (P14780) and pappalysin-2 (Q9BXP8), and diagnosing said subject with pre-eclampsia, if two or more of said tested proteins shows a statistically significant difference in the maternal serum sample relative to normal maternal serum.

17. The method of claim 16 comprising diagnosing said subject with pre-eclampsia, if all of said tested proteins show a statistically significant difference in the maternal serum sample relative to normal maternal serum.

18. The method of claim 2 wherein said level is determined by an immunoassay.

19. The method of claim 2 wherein said level is determined by mass spectrometry.

20. The method of claim 2 wherein said level is determined using a protein array.

21. An immunoassay kit comprising antibodies and reagents for the detection of one or more proteins selected from the group consisting of alpha-1B-glycoprotein (P04217), actin (P62736), apolipoprotein B-100 (Q13787), apolipoprotein C-II (P02655), apolipoprotein C-III (P02656), C4b-binding protein beta chain (P20851), cathepsin D (P07339), choriogonadotropin subunit beta (P1233), cholinesterase (P06276), chorionic somatomammotropin hormone (P01243), cystatin-C (P01034), endoglin (P17813), coagulation factor XI (P03951), coagulation factor VII (P08709), fibronectin (Q8IVI8), filamin-A (P21333), heparin cofactor 2 (P05546), hepatocyte growth factor-like protein (P26927), histidine-rich glycoprotein (P04196), insulin-like growth factor-binding protein 2 (P18065), laminin subunit beta-1 (P07942), lipopolysaccharide-binding protein (P18428), matrix metalloproteinase-9 (P14780), pappalysin-2 (Q9BXP8), plastin-2 (P13796), profiling-1 (P07737), pregnancy-specific bet-1-glycoprotein (P11464), receptor-type tyrosine-protein phosphatase gamma (P23470), pregnancy zone protein (P20742), plasma retinol-binding protein (P02753), SH3 domain-binding glutamic acid-rich-like protein 3 (Q9H299), trangelin-2 (P37802), talin-1 (Q9Y490), tropomyosin alpha-4-chain (P67936), vasorin (Q6EMK4), vascular endothelial growth factor receptor 3 (P35916), vinculin (P18206), von Willebrand factor (P04275).

22. An immunoassay kit comprising antibodies and reagents for the detection of one or more proteins selected from the group consisting of cystatin-C (P01034), endoglin (P17813), fibronectin (Q8IVI8), apolipoprotein C-III (P02656), choriogonadotropin subunit beta (P1233) and pappalysin-2 (Q9BXP8).

23. The immunoassay kit of claim 22 comprising antibodies and reagents for the detection of all of said proteins.

24. An immunoassay kit comprising antibodies and reagents for the detection of one or more proteins selected from the group consisting of cystatin-C (P01034), endoglin (P17813), fibronectin (Q8IVI8), apolipoprotein C-III (P02656), and pappalysin-2 (Q9BXP8).

25. The immunoassay kit of claim 24 comprising antibodies and reagents for the detection of all of said proteins.

26. An immunoassay kit comprising antibodies and reagents for the detection of one or more proteins selected from the group consisting of fibronectin (Q8IVI8), pappalysin-2 (Q9BXP8), and matrix metalloproteinase-9 (P14780).

27. The immunoassay kit of claim 26 comprising antibodies and reagents for the detection of all of said proteins.

28. A report comprising the results of and/or diagnosis based on a test comprising
(a) testing in a maternal serum sample obtained from said subject the level of two or more proteins selected from the group consisting of apolipoprotein C-III (P02656), choriogonadotropin subunit beta (P1233), cystatin-C (P01034), endoglin (P17813), fibronectin (Q8IVI8), matrix metalloproteinase-9 (P14780), and pappalysin-2 (Q9BXP8), relative to the level in normal maternal serum or maternal serum known to be indicative of pre-eclampsia; and
(b) diagnosing said subject with pre-eclampsia if said level is determined to show a statistically significant difference relative to the level in said normal maternal serum, or is determined not to show a statistically significant difference relative to the level in said maternal serum known to be indicative of pre-eclampsia.

29. A tangible medium storing the results of and/or diagnosis based on a test comprising
(a) testing in a maternal serum sample obtained from said subject the level of two or more proteins selected from the group consisting of apolipoprotein C-III (P02656), choriogonadotropin subunit beta (P1233), cystatin-C (P01034), endoglin (P17813), fibronectin (Q8IVI8), matrix metalloproteinase-9 (P14780), and pappalysin-2 (Q9BXP8), relative to the level in normal maternal serum or maternal serum known to be indicative of pre-eclampsia; and
(b) diagnosing said subject with pre-eclampsia if said level is determined to show a statistically significant difference relative to the level in said normal maternal serum, or is determined not to show a statistically significant difference relative to the level in said maternal serum known to be indicative of pre-eclampsia.

30. A method for the diagnosis of pre-eclampsia in a female mammalian subject in early gestation comprising:
(a) testing in a maternal serum sample obtained from said subject the level of two or more proteins selected from the group consisting of alpha-2-antiplasmin (P08697), actin (P60709), afamin (P43652), antithrombin-III (P01008), apolipoprotein-A-II (P02652), attractin (Q9NTQ4), beta-2-microglobulin (P61769), transforming growth factor-beta-induced protein ig-h3 (Q15582), C4b-binding protein alpha chain (P04003), cathepsin D (P07339), carboxypeptidase B2 (Q961Y4), complement factor D (P00746), cartilage acidic protein 1 (Q9NQ79), dopamine beta-hydroxylase (P09172), coagulation factor XIII B chain (P05160), fibrinogen alpha chain (P02671), fibronectin (Q8IVI8), filamin A (P21333), Rho GDP-dissociation inhibitor 2 (P52566), platelet glycoprotein-1b alpha chain (P07359), haptoglobin-related protein (P00739), lipopolysaccharide-binding protein (P18418), plasma retinol-binding protein (P02753), platelet basic protein (P02775), transgelin-2 (P37802), tubulin beta-1 chain (Q9H4B7), talin-1 (Q9Y490), thymosin beta-4 (P62328), vasorin (Q6EMK4), vascular cell adhesion protein-1 (P19320), von Willebrand factor (P04275), zinc-alpha-2-glycoprotein (P25311), alpha-2-macroglobulin (P01023), apolipoprotein B-100 (Q13787), apolipoprotein C-III (P02656), choriogonadotropin subunit beta (P01233), chorionic somatomammotropin hormone (P01243), cystatin-C (P01034), endoglin (P17813), matrix metalloproteinase-9 (P14780), pappalysin-1 (Q13219), pregnancy-specific beta-1-glycoprotein 1 (Q9P1W5), vascular endothelial growth factor receptor 3 (P35916), C-reactive protein (P02741), serum amyloid P-component (P02743), membrane copper amine oxidase (Q16853), and catalase (P04040), relative to the level in normal maternal serum or maternal serum known to be indicative of pre-eclampsia; and
(b) diagnosing said subject with pre-eclampsia if said level shows a statistically significant difference relative to the level in said normal maternal serum, or does not show a statistically significant difference relative to the level in said maternal serum known to be indicative of pre-eclampsia.

31. The method of claim 30 wherein the subject is a human patient.

32. The method of claim 31, wherein said testing is implemented using an apparatus adapted to determine the level of said proteins.

33. The method of claim 31, wherein said testing is performed by using a software program executed by a suitable processor.

34. The method of claim 33, wherein the program is embodied in software stored on a tangible medium.

35. The method of claim 34 wherein the tangible medium is selected from the group consisting of a flash drive, a CD-ROM, a floppy disk, a hard drive, a DVD, and a memory associated with the processor.

36. The method of any one of claims 31 to 35, further comprising the step of preparing a report recording the results of said testing or the diagnosis.

37. The method of claim 36 wherein said report is recorded or stored on a tangible medium.

38. The method of claim 37 wherein the tangible medium is paper.

39. The method of claim 37 wherein the tangible medium is selected from the group consisting of a flash drive, a CD-ROM, a floppy disk, a hard drive, a DVD, and a memory associated with the processor.

40. The method of any one of claims 31 to 35, further comprising the step of communicating the results of said diagnosis to an interested party.

41. The method of claim 40 wherein the interested party is the patient or the attending physician.

42. The method of claim 40 wherein the communication is in writing, by email, or by telephone.

43. The method of claim 30 wherein the subject is about 9 to about 11 weeks gestation.

44. The method of claim 30 wherein the subject is about 10 to about 14 weeks gestation.

45. The method of claim 30 wherein the pre-eclampsia is severe pre-eclampsia.

46. The method of any one of claims 43-45 comprising testing the level of at least three of said proteins.

47. The method of any one of claims 43-45 comprising testing the level of at least four of said proteins.

48. The method of any one of claims 43-45 comprising testing the level of at least five of said proteins.

49. The method of claim 43 comprising testing the level of at least six of said proteins.

50. The method of claim 43 comprising testing the level of proteins complement factor D (P00746), vascular cell adhesion protein-1 (P19320), pappalysin-1 (Q13219), endoglin (P17813), plasma retinol-binding protein (P02753), and choriogonadotropin subunit beta (P01233).

51. The method of claim 44 comprising testing the level of proteins membrane copper amine oxidase (Q16853), C-reactive protein (P02741), Serum amyloid P-component (P02743), catalase, tubulin beta, plasma retinol binding protein, lipopolysaccharide binding protein, and chorionic somatomammotropin.

52. The method of claim 44 comprising testing the level of proteins pappalysin-1 (SEQ ID NO: 63), vascular cell adhesion protein 1 (SEQ ID NO: 60), beta-2-microglobulin (SEQ ID NO: 45), and cystatin C (SEQ ID NO: 11).

53. The method of claim 45 comprising testing the level of proteins C-reactive protein (P02741), vascular cell adhesion protein-1 (P19320), pappalysin-1 (Q13219), beta-2-microglobulin (P61769), and plasma retinol-binding protein (P02753).

54. The method of claim 30 wherein said level is determined by an immunoassay.

55. The method of claim 30 wherein said level is determined by mass spectrometry.

56. The method of claim 30 wherein said level is determined using a protein array.

57. An immunoassay kit comprising antibodies and reagents for the detection of two or more proteins selected from the group consisting of alpha-2-antiplasmin (P08697), actin (P60709), afamin (P43652), antithrombin-III (P01008), apolipoprotein-A-II (P02652), attractin (Q9NTQ4), beta-2-microglobulin (P61769), transforming growth factor-beta-induced protein ig-h3 (Q15582), C4b-binding protein alpha chain (P04003), cathepsin D (P07339), carboxypeptidase B2 (Q961Y4), complement factor D (P00746), cartilage acidic protein 1 (Q9NQ79), dopamine beta-hydroxylase (P09172), coagulation factor XIII B chain (P05160), fibrinogen alpha chain (P02671), fibronectin (Q8IVI8), filamin A (P21333), Rho GDP-dissociation inhibitor 2 (P52566), platelet glycoprotein-1b alpha chain (P07359), haptoglobin-related protein (P00739), lipopolysaccharide-binding protein (P18418), plasma retinol-binding protein (P02753), platelet basic protein (P02775), transgelin-2 (P37802), tubulin beta-1 chain (Q9H4B7), talin-1 (Q9Y490), thymosin beta-4 (P62328), vasorin (Q6EMK4), vascular cell adhesion protein-1 (P19320), von Willebrand factor (P04275), zinc-alpha-2-glycoprotein (P25311), alpha-2-macroglobulin (P01023), apolipoprotein B-100 (Q13787), apolipoprotein C-III (P02656), choriogonadotropin subunit beta (P01233), chorionic somatomammotropin hormone (P01243), cystatin-C (P01034), endoglin (P17813), matrix metalloproteinase-9 (P14780), pappalysin-1 (Q13219), pregnancy-specific beta-1-glycoprotein 1 (Q9P1W5), vascular endothelial growth factor receptor 3 (P35916), C-reactive protein (P02741), serum amyloid P-component (P02743), membrane copper amine oxidase (Q16853), and catalase (P04040).

58. An immunoassay kit comprising antibodies and reagents for the detection of two or more proteins selected from the group consisting of complement factor D (P00746), vascular cell adhesion protein-1 (P19320), and pappalysin-1 (Q13219).

59. The immunoassay kit of claim 58 comprising antibodies and reagents for the detection of all of said proteins.

60. An immunoassay kit comprising antibodies and reagents for the detection of two or more proteins selected from the group consisting of complement factor D (P00746), vascular cell adhesion protein-1 (P19320), pappalysin-1 (Q13219), endoglin (P17813), choriogonadoropin subunit beta (P01233) and plasma retinol-binding protein (P02753).

61. The immunoassay kit of claim 60 comprising antibodies and reagents for the detection of all of said proteins.

62. An immunoassay kit comprising antibodies and reagents for the detection of two or more proteins selected from the group consisting of pappalysin-1 (Q13219), C-reactive protein (P02741), plasma retinol-binding protein (P02753), beta-2-microglobulin (P61769) and vascular cell adhesion protein 1 (P19320).

63. The immunoassay kit of claim 62 comprising antibodies and reagents for the detection of all of said proteins.

64. A report comprising the results of and/or diagnosis based on a test comprising
(a) testing in a maternal serum sample obtained from said subject the level of two or more proteins selected from the group consisting of alpha-2-antiplasmin (P08697), actin (P60709), afamin (P43652), antithrombin-III (P01008), apolipoprotein-A-II (P02652), attractin (Q9NTQ4), beta-2-microglobulin (P61769), transforming growth factor-beta-induced protein ig-h3 (Q15582), C4b-binding protein alpha chain (P04003), cathepsin D (P07339), carboxypeptidase B2 (Q961Y4), complement factor D (P00746), cartilage acidic protein 1 (Q9NQ79), dopamine beta-hydroxylase (P09172), coagulation factor XIII B chain (P05160), fibrinogen alpha chain (P02671), fibronectin (Q8IVI8), filamin A (P21333), Rho GDP-dissociation inhibitor 2 (P52566), platelet glycoprotein-1b alpha chain (P07359), haptoglobin-related protein (P00739), lipopolysaccharide-binding protein (P18418), plasma retinol-binding protein (P02753), platelet basic protein (P02775), transgelin-2 (P37802), tubulin beta-1 chain (Q9H4B7), talin-1 (Q9Y490), thymosin beta-4 (P62328), vasorin (Q6EMK4), vascular cell adhesion protein-1 (P19320), von Willebrand factor (P04275), zinc-alpha-2-glycoprotein (P25311), alpha-2-macroglobulin (P01023), apolipoprotein B-100 (Q13787), apolipoprotein C-III (P02656), choriogonadotropin subunit beta (P01233), chorionic somatomammotropin hormone (P01243), cystatin-C (P01034), endoglin (P17813), matrix metalloproteinase-9 (P14780), pappalysin-1 (Q13219), pregnancy-specific beta-1-glycoprotein 1 (Q9P1W5), vascular endothelial growth factor receptor 3 (P35916), C-reactive protein (P02741), serum amyloid P-component (P02743), membrane copper amine oxidase (Q16853), and catalase (P04040), relative to the level in normal maternal serum or maternal serum known to be indicative of pre-eclampsia; and
(b) diagnosing said subject with pre-eclampsia if said level shows a statistically significant difference relative to the level in said normal maternal serum, or does not show a statistically significant difference relative to the level in said maternal serum known to be indicative of pre-eclampsia.

65. A tangible medium storing the results of and/or diagnosis based on a test comprising
(a) testing in a maternal serum sample obtained from said subject the level of two or more proteins selected from the group consisting of alpha-2-antiplasmin (P08697), actin (P60709), afamin (P43652), antithrombin-III (P01008), apolipoprotein-A-II (P02652), attractin (Q9NTQ4), beta-2-microglobulin (P61769), transforming growth factor-beta-induced protein ig-h3 (Q15582), C4b-binding protein alpha chain (P04003), cathepsin D (P07339), carboxypeptidase B2 (Q961Y4), complement factor D (P00746), cartilage acidic protein 1 (Q9NQ79), dopamine beta-hydroxylase (P09172), coagulation factor XIII B chain (P05160), fibrinogen alpha chain (P02671), fibronectin (Q8IVI8), filamin A (P21333), Rho GDP-dissociation inhibitor 2 (P52566), platelet glycoprotein-1b alpha chain (P07359), haptoglobin-related protein (P00739), lipopolysaccharide-binding protein (P18418), plasma retinol-binding protein (P02753), platelet basic protein (P02775), transgelin-2 (P37802), tubulin beta-1 chain (Q9H4B7), talin-1 (Q9Y490), thymosin beta-4 (P62328), vasorin (Q6EMK4), vascular cell adhesion protein-1 (P19320), von Willebrand factor (P04275), zinc-alpha-2-glycoprotein (P25311), alpha-2-macroglobulin (P01023), apolipoprotein B-100 (Q13787), apolipoprotein C-III (P02656), choriogonadotropin subunit beta (P01233), chorionic somatomammotropin hormone (P01243), cystatin-C (P01034), endoglin (P17813), matrix metalloproteinase-9 (P14780), pappalysin-1 (Q13219), pregnancy-specific beta-1-glycoprotein 1 (Q9P1W5), vascular endothelial growth factor receptor 3 (P35916), C-reactive protein (P02741), serum amyloid P-component (P02743), membrane copper amine oxidase (Q16853), and catalase (P04040), relative to the level in normal maternal serum or maternal serum known to be indicative of pre-eclampsia; and
(b) diagnosing said subject with pre-eclampsia if said level shows a statistically significant difference relative to the level in said normal maternal serum, or does not show a statistically significant difference relative to the level in said maternal serum known to be indicative of pre-eclampsia.

66. A method for the diagnosis of gestational hypertension in a pregnant female mammalian subject comprising:
(a) testing in a maternal serum sample obtained from said subject the level of two or more proteins selected from the group consisting of cystatin-C (SEQ ID NO: 11), alpha-1-acid glycoprotein 1 (SEQ ID NO: 104), beta-2-microglobulin (SEQ ID NO: 45), cathepsin D (SEQ ID NO: 7), laminin subunit beta-1 (SEQ ID NO: 21), fibronectin (SEQ ID NO:15), chorionic somatomammotropin hormone (SEQ ID NO: 10), SH3 domain-binding glutamic acid-rich-like protein 3 (SEQ ID NO: 30), filamin-A (SEQ ID NO: 16), profilin-1 (SEQ ID NO: 25), serum amyloid P-component (SEQ ID NO: 65), fructose-biphosphate aldolase A (SEQ ID NO: 106), transgelin-2 (SEQ ID NO: 31), vinculin (SEQ ID NO: 36), cartilage acidic protein 1 (SEQ ID NO:50), plastin-2 (SEQ ID NO: 24), tropomyosin alpha-4 chain (SEQ ID NO: 33), 14-3-3 protein zeta/delta (SEQ ID NO: 108), alpha-actinin-1 (SEQ ID NO: 112), catalase (SEQ ID NO: 72), phospholipid transfer protein (SEQ ID NO: 94), phosphoglycerate mutase 1 (SEQ ID NO: 113), peroxiredoxin-2 (SEQ ID NO: 77), trem-like transcript 1 protein (SEQ ID NO: 114), choriogonadotropin subunit beta (SEQ ID NO: 8), glutathione S-transferase P (SEQ ID NO:115), leucyl-cystinyl aminopeptidase (SEQ ID NO: 116), vascular endothelial growth factor receptor 3 (SEQ ID NO: 35), adenylyl cyclase-associated protein 1 (SEQ ID NO: 117), matrix metalloproteinase-9 (SEQ ID NO: 23), peptidyl-prolyl cis-trans isomerase A (SEQ ID NO: 118), transketolase (SEQ ID NO: 119), and phosphoglycerate kinase 1 (SEQ ID NO: 120), relative to the level in normal maternal serum or maternal serum known to be indicative of gestational hypertension; and
(b) diagnosing said subject with gestational hypertension if said level shows a statistically significant difference relative to the level in said normal maternal serum, or does not show a statistically significant difference relative to the level in said maternal serum known to be indicative of gestational hypertension.

67. The method of claim 66 wherein the subject is a human patient.

68. The method of claim 67, wherein said testing is implemented using an apparatus adapted to determine the level of said proteins.

69. The method of claim 67, wherein said testing is performed by using a software program executed by a suitable processor.

70. The method of claim 69, wherein the program is embodied in software stored on a tangible medium.

71. The method of claim 70 wherein the tangible medium is selected from the group consisting of a flash drive, a CD-ROM, a floppy disk, a hard drive, a DVD, and a memory associated with the processor.

72. The method of any one of claims 67 to 71, further comprising the step of preparing a report recording the results of said testing or the diagnosis.

73. The method of claim 72 wherein said report is recorded or stored on a tangible medium.

74. The method of claim 73 wherein the tangible medium is paper.

75. The method of claim 73 wherein the tangible medium is selected from the group consisting of a flash drive, a CD-ROM, a floppy disk, a hard drive, a DVD, and a memory associated with the processor.

76. The method of any one of claims 67 to 71, further comprising the step of communicating the results of said diagnosis to an interested party.

77. The method of claim 76 wherein the interested party is the patient or the attending physician.

78. The method of claim 76 wherein the communication is in writing, by email, or by telephone.

79. The method of claim 67 comprising testing the level of at least three of said proteins.

80. The method of claim 67 comprising testing the level of at least four of said proteins.

81. The method of claim 67 comprising testing the level of proteins Pappalysin-2 (SEQ ID NO: 38), choriogonadotropin subunit beta (SEQ ID NO: 8), histidine rich glycoprotein (SEQ ID NO: 19), plasma retinol-binding protein (SEQ ID NO: 29), Matrix metalloproteinase-9 (SEQ ID NO: 23), Apolipoprotein B-100 (SEQ ID NO: 3), endoglin (SEQ ID NO: 12), and Vascular endothelial growth factor receptor 1 (SEQ ID NO: 121).

82. The method of claim 67 wherein said level is determined by an immunoassay.

83. The method of claim 67 wherein said level is determined by mass spectrometry.

84. The method of claim 67 wherein said level is determined using a protein array.

85. A report comprising the results of and/or diagnosis based on a test comprising
(a) testing in a maternal serum sample obtained from said subject the level of two or more proteins selected from the group consisting of cystatin-C (SEQ ID NO: 11), alpha-1-acid glycoprotein 1 (SEQ ID NO: 104), beta-2-microglobulin (SEQ ID NO: 45), cathepsin D (SEQ ID NO: 7), laminin subunit beta-1 (SEQ ID NO: 21), fibronectin (SEQ ID NO:15), chorionic somatomammotropin hormone (SEQ ID NO: 10), SH3 domain-binding glutamic acid-rich-like protein 3 (SEQ ID NO: 30), filamin-A (SEQ ID NO: 16), profilin-1 (SEQ ID NO: 25), serum amyloid P-component (SEQ ID NO: 65), fructose-biphosphate aldolase A (SEQ ID NO: 106), transgelin-2 (SEQ ID NO: 31), vinculin (SEQ ID NO: 36), cartilage acidic protein 1 (SEQ ID NO:50), plastin-2 (SEQ ID NO: 24), tropomyosin alpha-4 chain (SEQ ID NO: 33), 14-3-3 protein zeta/delta (SEQ ID NO: 108), alpha-actinin-1 (SEQ ID NO: 112), catalase (SEQ ID NO: 72), phospholipid transfer protein (SEQ ID NO: 94), phosphoglycerate mutase 1 (SEQ ID NO: 113), peroxiredoxin-2 (SEQ ID NO: 77), trem-like transcript 1 protein (SEQ ID NO: 114), choriogonadotropin subunit beta (SEQ ID NO: 8), glutathione S-transferase P (SEQ ID NO: 115), leucyl-cystinyl aminopeptidase (SEQ ID NO: 116), vascular endothelial growth factor receptor 3 (SEQ ID NO: 35), adenylyl cyclase-associated protein 1 (SEQ ID NO: 117), matrix metalloproteinase-9 (SEQ ID NO: 23), peptidyl-prolyl cis-trans isomerase A (SEQ ID NO: 118), transketolase (SEQ ID NO: 119), and phosphoglycerate kinase 1 (SEQ ID NO: 120), relative to the level in normal maternal serum or maternal serum known to be indicative of gestational hypertension; and
(b) diagnosing said subject with gestational hypertension if said level shows a statistically significant difference relative to the level in said normal maternal serum, or does not show a statistically significant difference relative to the level in said maternal serum known to be indicative of gestational hypertension.

86. A tangible medium storing the results of and/or diagnosis based on a test comprising
(a) testing in a maternal serum sample obtained from said subject the level of two or more proteins selected from the group consisting of cystatin-C (SEQ ID NO: 11), alpha-1-acid glycoprotein 1 (SEQ ID NO: 104), beta-2-microglobulin (SEQ ID NO: 45), cathepsin D (SEQ ID NO: 7), laminin subunit beta-1 (SEQ ID NO: 21), fibronectin (SEQ ID NO:15), chorionic somatomammotropin hormone (SEQ ID NO: 10), SH3 domain-binding glutamic acid-rich-like protein 3 (SEQ ID NO: 30), filamin-A (SEQ ID NO: 16), profilin-1 (SEQ ID NO: 25), serum amyloid P-component (SEQ ID NO: 65), fructose-biphosphate aldolase A (SEQ ID NO: 106), transgelin-2 (SEQ ID NO: 31), vinculin (SEQ ID NO: 36), cartilage acidic protein 1 (SEQ ID NO:50), plastin-2 (SEQ ID NO: 24), tropomyosin alpha-4 chain (SEQ ID NO: 33), 14-3-3 protein zeta/delta (SEQ ID NO: 108), alpha-actinin-1 (SEQ ID NO: 112), catalase (SEQ ID NO: 72), phospholipid transfer protein (SEQ ID NO: 94), phosphoglycerate mutase 1 (SEQ ID NO: 113), peroxiredoxin-2 (SEQ ID NO: 77), trem-like transcript 1 protein (SEQ ID NO: 114), choriogonadotropin subunit beta (SEQ ID NO: 8), glutathione S-transferase P (SEQ ID NO: 115), leucyl-cystinyl aminopeptidase (SEQ ID NO: 116), vascular endothelial growth factor receptor 3 (SEQ ID NO: 35), adenylyl cyclase-associated protein 1 (SEQ ID NO: 117), matrix metalloproteinase-9 (SEQ ID NO: 23), peptidyl-prolyl cis-trans isomerase A (SEQ ID NO: 118), transketolase (SEQ ID NO: 119), and phosphoglycerate kinase 1 (SEQ ID NO: 120), relative to the level in normal maternal serum or maternal serum known to be indicative of gestational hypertension; and
(b) diagnosing said subject with gestational hypertension if said level shows a statistically significant difference relative to the level in said normal maternal serum, or does not show a statistically significant difference relative to the level in said maternal serum known to be indicative of gestational hypertension.

87. A method for the diagnosis of placental insufficiency in a pregnant female mammalian subject having preeclampsia comprising:
(a) testing in a maternal serum sample obtained from said subject the level of two or more proteins selected from the group consisting of fibronectin (SEQ ID NO:15), vascular endothelial growth factor receptor 3 (SEQ ID NO: 35), chorionic somatomammortrophin (SEQ ID NO: 10), and pregnancy-specific glycoprotein (SEQ ID NO: 26), relative to the level in normal maternal serum or maternal serum known to be indicative of placental insufficiency; and
(b) diagnosing said subject with placental insufficiency if said level shows a statistically significant difference relative to the level in said normal maternal serum, or does not show a statistically significant difference relative to the level in said maternal serum known to be indicative of placental insufficiency.

88. The method of claim 87 wherein the subject is a human patient.

89. The method of claim 88, wherein said testing is implemented using an apparatus adapted to determine the level of said proteins.

90. The method of claim 88, wherein said testing is performed by using a software program executed by a suitable processor.

91. The method of claim 90, wherein the program is embodied in software stored on a tangible medium.

92. The method of claim 91 wherein the tangible medium is selected from the group consisting of a flash drive, a CD-ROM, a floppy disk, a hard drive, a DVD, and a memory associated with the processor.

93. The method of any one of claims 88 to 92, further comprising the step of preparing a report recording the results of said testing or the diagnosis.

94. The method of claim 93 wherein said report is recorded or stored on a tangible medium.

95. The method of claim 94 wherein the tangible medium is paper.

96. The method of claim 94 wherein the tangible medium is selected from the group consisting of a flash drive, a CD-ROM, a floppy disk, a hard drive, a DVD, and a memory associated with the processor.

97. The method of any one of claims 88 to 92, further comprising the step of communicating the results of said diagnosis to an interested party.

98. The method of claim 97 wherein the interested party is the patient or the attending physician.

99. The method of claim 97 wherein the communication is in writing, by email, or by telephone.

100. The method of claim 97 comprising testing the abundance of at least three of said proteins.

101. The method of claim 87 comprising testing the abundance of at least four of said proteins.

102. The method of claim 87 wherein said level is determined by an immunoassay.

103. The method of claim 87 wherein said level is determined by mass spectrometry.

104. The method of claim 87 wherein said level is determined using a protein array.

105. A report comprising the results of and/or diagnosis based on a test comprising
(a) testing in a maternal serum sample obtained from said subject the level of two or more proteins selected from the group consisting of fibronectin (SEQ ID NO:15), vascular endothelial growth factor receptor 3 (SEQ ID NO: 35), chorionic somatomammortrophin (SEQ ID NO: 10), and pregnancy-specific glycoprotein (SEQ ID NO: 26), relative to the level in normal maternal serum or maternal serum known to be indicative of placental insufficiency; and
(b) diagnosing said subject with placental insufficiency if said level shows a statistically significant difference relative to the level in said normal maternal serum, or does not show a statistically significant difference relative to the level in said maternal serum known to be indicative of placental insufficiency.

106. A tangible medium storing the results of and/or diagnosis based on a test comprising
(a) testing in a maternal serum sample obtained from said subject the level of two or more proteins selected from the group consisting of fibronectin (SEQ ID NO:15), vascular endothelial growth factor receptor 3 (SEQ ID NO: 35), chorionic somatomammortrophin (SEQ ID NO: 10), and pregnancy-specific glycoprotein (SEQ ID NO: 26), relative to the level in normal maternal serum or maternal serum known to be indicative of placental insufficiency; and
(b) diagnosing said subject with placental insufficiency if said level shows a statistically significant difference relative to the level in said normal maternal serum, or does not show a statistically significant difference relative to the level in said maternal serum known to be indicative of placental insufficiency.

The application's sequence listing, which the Patent Office published only in electronic form, follows.

SEQUENCE LISTING (121 sequences)

SEQ ID NO: 1 - protein, 495 aa, Homo sapiens [sequence omitted]

SEQ ID NO: 2 - protein, 377 aa, Homo sapiens
MCEEEDSTALVCDNGSGLCKAGFAGDDAPRAVFPSIVGRPRHQGVMVGMGQKDSYVGDEAQSKRGILTLKYPIEHGIITNWDDMEKIWHHSFYNELRVAPEEHPTLLTEAPLNPKANREKMTQIMFETFNVPAMYVAIQAVLSLYASGRTTGIVLDSGDGVTHNVPIYEGYALPHAIMRLDLAGRDLTDYLMKILTERGYSFVTTAEREIVRDIKEKLCYVALDFENEMATAASSSSLEKSYELPDGQVITIGNERFRCPETLFQPSFIGMESAGIHETTYNSIMKCDIDIRKDLYANNVLSGGTTMYPGIADRMQKEITALAPSTMKIKIIAPPERKYSVWIGGSILASLSTFQQMWISKQEYDEAGPSIVHRKCF

SEQ ID NO: 3 - protein, 4563 aa, Homo sapiens
MDPPRPALLALLALPALLLLLLAGARAEEEMLENVSLVCPKDATRFKHLRKYTYNYEAESSSGVPGTADSRSATRINCKVELEVPQLCSFILKTSQCTLKEVYGFNPEGKALLKKTKNSEEFAAAMSRYELKLAIPEGKQVFLYPEKDEPTYILNIKRGIISALLVPPETEEAKQVLFLDTVYGNCSTHFTVKTRKGNVATEISTERDLGQCDRFKPIRTGISPLALIKGMTRPLSTLISSSQSCQYTLDAKRKHVAEAICKEQHLFLPFSYNNKYGMVAQVTQTLKLEDTPKINSRFFGEGTKKMGLAFESTKSTSPPKQAEAVLKTLQELKKLTISEQNIQRANLFNKLVTELRGLSDEAVTSLLPQLIEVSSPITLQALVQCGQPQCSTHILQWLKRVHANPLLIDVVTYLVALIPEPSAQQLREIFNMARDQRSRATLYALSHAVNNYHKTNPTGTQELLDIANYLMEQIQDDCTGDEDYTYLILRVIGNMGQTMEQLTPELKSSILKCVQSTKPSLMIQKAAIQALRKMEPKDKDQEVLLQTFLDDASPGDKRLAAYLMLMRSPSQADINKIVQILPWEQNEQVKNFVASHIANILNSEELDIQDLKKLVKEALKESQLPTVMDFRKFSRNYQLYKSVSLPSLDPASAKIEGNLIFDPNNYLPKESMLKTTLTAFGFASADLIEIGLEGKGFEPTLEALFGKQGFFPDSVNKALYWVNGQVPDGVSKVLVDHFGYTKDDKHEQDMVNGIMLSVEKLIKDLKSKEVPEARAYLRILGEELGFASLHDLQLLGKLLLMGARTLQGIPQMIGEVIRKGSKNDFFLHYIFMENAFELPTGAGLQLQISSSGVIAPGAKAGVKLEVANMQAELVAKPSVSVEFVTNMGIIIPDFARSGVQMNTNFFHESGLEAHVALKAGKLKFIIPSPKRPVKLLSGGNTLHLVSTTKTEVIPPLIENRQSWSVCKQVFPGLNYCTSGAYSNASSTDSASYYPLTGDTRLELELRPTGEIEQYSVSATYELQREDRALVDTLKFVTQAEGAKQTEATMTFKYNRQSMTLSSEVQIPDFDVDLGTILRVNDESTEGKTSYRLTLDIQNKKITEVALMGHLSCDTKEERKIKGVISIPRLQAEARSEILAHWSPAKLLLQMDSSATAYGSTVSKRVAWHYDEEKIEFEWNTGTNVDTKKMTSNFPVDLSDYPKSLHMYANRLLDHRVPETDMTFRHVGSKLIVAMSSWLQKASGSLPYTQTLQDHLNSLKEFNLQNMGLPDFHIPENLFLKSDGRVKYTLNKNSLKIEIPLPFGGKSSRDLKMLETVRTPALHFKSVGFHLPSREFQVPTFTIPKLYQLQVPLLGVLDLSTNVYSNLYNWSASYSGGNTSTDHFSLRARYHMKADSVVDLLSYNVQGSGETTYDHKNTFTLSCDGSLRHKFLDSNIKFSHVEKLGNNPVSKGLLIFDASSSWGPQMSASVHLDSKKKQHLFVKEVKIDGQFRVSSFYAKGTYGLSCQRDPNTGRLNGESNLRFNSSYLQGTNQITGRYEDGTLSLTSTSDLQSGIIKNTASLKYENYELTLKSDTNGKYKNFATSNKMDMTFSKQNALLRSEYQADYESLRFFSLLSGSLNSHGLELNADILGTDKINSGAHKATLRIGQDGISTSATTNLKCSLLVLENELNAELGLSGASMKLTTNGRFREHNAKFSLDGKAALTELSLGSAYQAMILGVDSKNIFNFKVSQEGLKLSNDMMGSYAEMKFDHTNSLNIAGLSLDFSSKLDNIYSSDKFYKQTVNLQLQPYSLVTTLNSDLKYNALDLTNNGKLRLEPLKLHVAGNLKGAYQNNEIKHIYAISSAALSASYKADTVAKVQGVEFSHRLNTDIAGLASAIDMSTNYNSDSLHFSNVFRSVMAPFTMTIDAHTNGNGKLALWGEHTGQLYSKFLLKAEPLAFTFSHDYKGSTSHHLVSRKSISAALEHKVSALLTPAEQTGTWKLKTQFNNNEYSQDLDAYNTKDKIGVELTGRTLADLTLLDSPIKVPLLLSEPINIIDALEMRDAVEKPQEFTIVAFVKYDKNQDVHSINLPFFETLQEYFERNRQTIIVVVENVQRNLKHINIDQFVRKYRAALGKLPQQANDYLNSFNWERQVSHAKEKLTALTKKYRITENDIQIALDDAKINFNEKLSQLQTYMIQFDQYIKDSYDLHDLKIAIANIIDEIIEKLKSLDEHYHIRVNLVKTIHDLHLFIENIDFNKSGSSTASWIQNVDTKYQIRIQIQEKLQQLKRHIQNIDIQHLAGKLKQHIEAIDVRVLLDQLGTTISFERINDVLEHVKHFVINLIGDFEVAEKINAFRAKVHELIERYEVDQQIQVLMDKLVELTHQYKLKETIQKLSNVLQQVKIKDYFEKLVGFIDDAVKKLNELSFKTFIEDVNKFLDMLIKKLKSFDYHQFVDETNDKIREVTQRLNGEIQALELPQKAEALKLFLEETKATVAVYLESLQDTKITLIINWLQEALSSASLAHMKAKFRETLEDTRDRMYQMDIQQELQRYLSLVGQVYSTLVTYISDWWTLAAKNLTDFAEQYSIQDWAKRMKALVEQGFTVPEIKTILGTMPAFEVSLQALQKATFQTPDFIVPLTDLRIPSVQINFKDLKNIKIPSRFSTPEFTILNTFHIPSFTIDFVEMKVKIIRTIDQMQNSELQWPVPDIYLRDLKVEDIPLARITLPDFRLPEIAIPEFIIPTLNLNDFQVPDLHIPEFQLPHISHTIEVPTFGKLYSILKIQSPLFTLDANADIGNGTTSANEAGIAASITAKGESKLEVLNFDFQANAQLSNPKINPLALKESVKFSSKYLRTEHGSEMLFFGNAIEGKSNTVASLHTEKNTLELSNGVIVKINNQLTLDSNTKYFHKLNIPKLDFSSQADLRNEIKTLLKAGHIAWTSSGKGSWKWACPRFSDEGTHESQISFTIEGPLTSFGLSNKINSKHLRVNQNLVYESGSLNFSKLEIQSQVDSQHVGHSVLTAKGMALFGEGKAEFTGRHDAHLNGKVIGTLKNSLFFSAQPFEITASTNNEGNLKVRFPLRLTGKIDFLNNYALFLSPSAQQASWQVSARFNQYKYNQNFSAGNNENIMEAHVGINGEANLDFLNIPLTIPEMRLPYTIITTPPLKDFSLWEKTGLKEFLKTTKQSFDLSVKAQYKKNKHRHSITNPLAVLCEFISQSIKSFDRHFEKNRNNALDFVTKSYNETKIKFDKYKAEKSHDELPRTFQIPGYTVPVVNVEVSPFTIEMSAFGYVFPKAVSMPSFSILGSDVRVPSYTLILPSLELPVLHVPRNLKLSLPHFKELCTISHIFIPAMGNITYDFSFKSSVITLNTNAELFNQSDIVAHLLSSSSSVIDALQYKLEGTTRLTRKRGLKLATALSLSNKFVEGSHNSTVSLTTKNMEVSVAKTTKAEIPILRMNFKQELNGNTKSKPTVSSSMEFKYDFNSSMLYSTAKGAVDHKLSLESLTSYFSIESSTKGDVKGSVLSREYSGTIASEANTYLNSKSTRSSVKLQGTSKIDDIWNLEVKENFAGEATLQRIYSLWEHSTKNHLQLEGLFFTNGEHTSKATLELSPWQMSALVQVHASQPSSFHDFPDLGQEVALNANTKNQKIRWKNEVRIHSGSFQSQVELSNDQEKAHLDIAGSLEGHLRFLKNIILPVYDKSLWDFLKLDVTTSIGRRQHLRVSTAFVYTKNPNGYSFSIPVKVLADKFITPGLKLNDLNSVLVMPTFHVPFTDLQVPSCKLDFREIQIYKKLRTSSFALNLPTLPEVKFPEVDVLTKYSQPEDSLIPFFEITVPESQLTVSQFTLPKSVSDGIAALDLNAVANKIADFELPTIIVPEQTIEIPSIKFSVPAGIVIPSFQALTARFEVDSPVYNATWSASLKNKADYVETVLDSTCSSTVQFLEYELNVLGTHKIEDGTLASKTKGTLAHRDFSAEYEEDGKFEGLQEWEGKAHLNIKSPAFTDLHLRYQKDKKGISTSAASPAVGTVGMDMDEDDDFSKWNFYYSPQSSPDKKLTIFKTELRVRESDEETQIKVNWEEEAASGLLTSLKDNVPKATGVLYDYVNKYHWEHTGLTLREVSSKLRRNLQNNAEWVYQGAIRQIDDIDVRFQKAASGTTGTYQEWKDKAQNLYQELLTQEGQASFQGLKDNVFDGLVRVTQKFHMKVKHLIDSLIDFLNFPRFQFPGKPGIYTREELCTMFIREVGTVLSQVYSKVHNGSEILFSYFQDLVITLPFELRKHKLIDVISMYRELLKDLSKEAQEVFKAIQSLKTTEVLRNLQDLLQFIFQLIEDNIKQLKEMKFTYLINYIQDEINTIFNDYIPYVFKLLKENLCLNLHKFNEFIQNELQEASQELQQIHQYIMALREEYFDPSIVGWTVKYYELEEKIVSLIKNLLVALKDFHSEYIVSASNFTSQLSSQVEQFLHRNIQEYLSILTDPDGKGKEKIAELSATAQEIIKSQAIATKKIISDYHQQFRYKLQDFSDQLSDYYEKFIAESKRLIDLSIQNYHTFLIYITELLKKLQSTTVMNPYMKLAPGELTIIL

SEQ ID NO: 4 - protein, 101 aa, Homo sapiens
MGTRLLPALFLVLLVLGFEVQGTQQPQQDEMPSPTFLTQVKESLSSYWESAKTAAQNLYEKTYLPAVDEKLRDLYSKSTAAMSTYTGIFTDQVLSVLKGEE

SEQ ID NO: 5 - protein, 99 aa, Homo sapiens
MQPRVLLVVALLALLASARASEAEDASLLSFMQGYMKHATKTAKDALSSVQESQVAQQARGWVTDGFSSLKDYWSTVKDKFSEFWDLDPEVRPTSAVAA

SEQ ID NO: 6 - protein, 252 aa, Homo sapiens
MFFWCACCLMVAWRVSASDAEHCPELPPVDNSIFVAKEVEGQILGTYVCIKGYHLVGKKTLFCNASKEWDNTTTECRLGHCPDPVLVNGEFSSSGPVNVSDKITFMCNDHYILKGSNRSQCLEDHTWAPPFPICKSRDCDPPGNPVHGYFEGNNFTLGSTISYYCEDRYYLVGVQEQQCVDGEWSSALPVCKLIQEAPKPECEKALLAFQESKNLCEAMENFMQQLKESGMTMEELKYSLELKKAELKAKLL

SEQ ID NO: 7 - protein, 412 aa, Homo sapiens
MQPSSLLPLALCLLAAPASALVRIPLHKFTSIRRTMSEVGGSVEDLIAKGPVSKYSQAVPAVTEGPIPEVLKNYMDAQYYGEIGIGTPPQCFTVVFDTGSSNLWVPSIHCKLLDIACWIHHKYNSDKSSTYVKNGTSFDIHYGSGSLSGYLSQDTVSVPCQSASSASALGGVKVERQVFGEATKQPGITFIAAKFDGILGMAYPRISVNNVLPVFDNLMQQKLVDQNIFSFYLSRDPDAQPGGELMLGGTDSKYYKGSLSYLNVTRKAYWQVHLDQVEVASGLTLCKEGCEAIVDTGTSLMVGPVDEVRELQKAIGAVPLIQGEYMIPCEKVSTLPAITLKLGGKGYKLSPEDYTLKVSQAGKTLCLSGFMGMDIPPPSGPLWILGDVFIGRYYTVFDRDNNRVGFAEAARL

SEQ ID NO: 8 - protein, 165 aa, Homo sapiens
MEMFQGLLLLLLLSMGGTWASKEPLRPRCRPINATLAVEKEGCPVCITVNTTICAGYCPTMTRVLQGVLPALPQVVCNYRDVRFESIRLPGCPRGVNPVVSYAVALSCQCALCRRSTTDCGGPKDHPLTCDDPRFQDSSSSKAPPPSLPSPSRLPGPSDTPILPQ

SEQ ID NO: 9 - protein, 602 aa, Homo sapiens
MHSKVTIICIRFLFWFLLLCMLIGKSHTEDDIIIATKNGKVRGMNLTVFGGTVTAFLGIPYAQPPLGRLRFKKPQSLTKWSDIWNATKYANSCCQNIDQSFPGFHGSEMWNPNTDLSEDCLYLNVWIPAPKPKNATVLIWIYGGGFQTGTSSLHVYDGKFLARVERVIVVSMNYRVGALGFLALPGNPEAPGNMGLFDQQLALQWVQKNIAAFGGNPKSVTLFGESAGAASVSLHLLSPGSHSLFTRAILQSGSFNAPWAVTSLYEARNRTLNLAKLTGCSRENETEIIKCLRNKDPQEILLNEAFVVPYGTPLSVNFGPTVDGDFLTDMPDILLELGQFKKTQILVGVNKDEGTAFLVYGAPGFSKDNNSIITRKEFQEGLKIFFPGVSEFGKESILFHYTDWVDDQRPENYREALGDVVGDYNFICPALEFTKKFSEWGNNAFFYYFEHRSSKLPWPEWMGVMHGYEIEFVFGLPLERRDNYTKAEEILSRSIVKRWANFAKYGNPNETQNNSTSWPVFKSTEQKYLTLNTESTRIMTKLRAQQCRFWTSFFPKVLEMTGNIDEAEWEWKAGFHRWNNYMMDWKNQFNDYTSKKESCVGL

SEQ ID NO: 10 - protein, 217 aa, Homo sapiens
MAPGSRTSLLLAFALLCLPWLQEAGAVQTVPLSRLFDHAMLQAHRAHQLAIDTYQEFEETYIPKDQKYSFLHDSQTSFCFSDSIPTPSNMEETQQKSNLELLRISLLLIESWLEPVRFLRSMFANNLVYDTSDSDDYHLLKDLEEGIQTLMGRLEDGSRRTGQILKQTYSKFDTNSHNHDALLKNYGLLYCFRKDMDKVETFLRMVQCRSVEGSCGF

SEQ ID NO: 11 - protein, 146 aa, Homo sapiens
MAGPLRAPLLLLAILAVALAVSPAAGSSPGKPPRLVGGPMDASVEEEGVRRALDFAVGEYNKASNDMYHSRALQVVRARKQIVAGVNYFLDVELGRTTCTKTQPNLDNCPFHDQPHLKRKAFCSFQIYAVPWQGTMTLSKSTCQDA

SEQ ID NO: 12 - protein, 658 aa, Homo sapiens
MDRGTLPLAVALLLASCSLSPTSLAETVHCDLQPVGPERGEVTYTTSQVSKGCVAQAPNAILEVHVLFLEFPTGPSQLELTLQASKQNGTWPREVLLVLSVNSSVFLHLQALGIPLHLAYNSSLVTFQEPPGVNTTELPSFPKTQILEWAAERGPITSAAELNDPQSILLRLGQAQGSLSFCMLEASQDMGRTLEWRPRTPALVRGCHLEGVAGHKEAHILRVLPGHSAGPRTVTVKVELSCAPGDLDAVLILQGPPYVSWLIDANHNMQIWTTGEYSFKIFPEKNIRGFKLPDTPQGLLGEARMLNASIVASFVELPLASIVSLHASSCGGRLQTSPAPIQTTPPKDTCSPELLMSLIQTKCADDAMTLVLKKELVAHLKCTITGLTFWDPSCEAEDRGDKFVLRSAYSSCGMQVSASMISNEAVVNILSSSSPQRKKVHCLNMDSLSFQLGLYLSPHFLQASNTIEPGQQSFVQVRVSPSVSEFLLQLDSCHLDLGPEGGTVELIQGRAAKGNCVSLLSPSPEGDPRFSFLLHFYTVPIPKTGTLSCTVALRPKTGSQDQEVHRTVFMRLNIISPDLSGCTSKGLVLPAVLGITFGAFLIGALLTAALWYIYSHTRSPSKREPVVAVAAPASSESSSTNHSIGSTQSTPCSTSSMA

SEQ ID NO: 13 - protein, 625 aa, Homo sapiens
MIFLYQVVHFILFTSVSGECVTQLLKDTCFEGGDITTVFTPSAKYCQVVCTYHPRCLLFTFTAESPSEDPTRWFTCVLKDSVTETLPRVNRTAAISGYSFKQCSHQISACNKDIYVDLDMKGINYNSSVAKSAQECQERCTDDVHCHFFTYATRQFPSLEHRNICLLKHTQTGTPTRITKLDKVVSGFSLKSCALSNLACIRDIFPNTVFADSNIDSVMAPDAFVCGRICTHHPGCLFFTFFSQEWPKESQRNLCLLKTSESGLPSTRIKKSKALSGFSLQSCRHSIPVFCHSSFYHDTDFLGEELDIVAAKSHEACQKLCTNAVRCQFFTYTPAQASCNEGKGKCYLKLSSNGSPTKILHGRGGISGYTLRLCKMDNECTTKIKPRIVGGTASVRGEWPWQVTLHTTSPTQRHLCGGSIIGNQWILTAAHCFYGVESPKILRVYSGILNQSEIKEDTSFFGVQEIIIHDQYKMAESGYDIALLKLETTVNYTDSQRPICLPSKGDRNVIYTDCWVTGWGYRKLRDKIQNTLQKAKIPLVTNEECQKRYRGHKITHKMICAGYREGGKDACKGDSGGPLSCKHNEVWHLVGITSWGEGCAQRERPGVYTNVVEYVDWILEKTQAV

SEQ ID NO: 14 - protein, 466 aa, Homo sapiens
MVSQALRLLCLLLGLQGCLAAGGVAKASGGETRDMPWKPGPHRVFVTQEEAHGVLHRRRRANAFLEELRPGSLERECKEEQCSFEEAREIFKDAERTKLFWISYSDGDQCASSPCQNGGSCKDQLQSYICFCLPAFEGRNCETHKDDQLICVNENGGCEQYCSDHTGTKRSCRCHEGYSLLADGVSCTPTVEYPCGKIPILEKRNASKPQGRIVGGKVCPKGECPWQVLLLVNGAQLCGGTLINTIWVVSAAHCFDKIKNWRNLIAVLGEHDLSEHDGDEQSRRVAQVIIPSTYVPGTTNHDIALLRLHQPVVLTDHVVPLCLPERTFSERTLAFVRFSLVSGWGQLLDRGATALELMVLNVPRLMTQDCLQQSRKVGDSPNITEYMFCAGYSDGSKDSCKGDSGGPHATHYRGTWYLTGIVSWGQGCATVGHFGVYTRVSQYIEWLQKLMRSEPRPGVLLRAPFP

SEQ ID NO: 15 - protein, 2386 aa, Homo sapiens
MLRGPGPGLLLLAVQCLGTAVPSTGASKSKRQAQQMVQPQSPVAVSQSKPGCYDNGKHYQINQQWERTYLGNALVCTCYGGSRGFNCESKPEAEETCFDKYTGNTYRVGDTYERPKDSMIWDCTCIGAGRGRISCTIANRCHEGGQSYKIGDTWRRPHETGGYMLECVCLGNGKGEWTCKPIAEKCFDHAAGTSYVVGETWEKPYQGWMMVDCTCLGEGSGRITCTSRNRCNDQDTRTSYRIGDTWSKKDNRGNLLQCICTGNGRGEWKCERHTSVQTTSSGSGPFTDVRAAVYQPQPHPQPPPYGHCVTDSGVVYSVGMQWLKTQGNKQMLCTCLGNGVSCQETAVTQTYGGNSNGEPCVLPFTYNGRTFYSCTTEGRQDGHLWCSTTSNYEQDQKYSFCTDHTVLVQTQGGNSNGALCHFPFLYNNHNYTDCTSEGRRDNMKWCGTTQNYDADQKFGFCPMAAHEEICTTNEGVMYRIGDQWDKQHDMGHMMRCTCVGNGRGEWTCIAYSQLRDQCIVDDITYNVNDTFHKRHEEGHMLNCTCFGQGRGRWKCDPVDQCQDSETGTFYQIGDSWEKYVHGVRYQCYCYGRGIGEWHCQPLQTYPSSSGPVEVFITETPSQPNSHPIQWNAPQPSHISKYILRWRPKNSVGRWKEATIPGHLNSYTIKGLKPGVVYEGQLISIQQYGHQEVTRFDFTTTSTSTPVTSNTVTGETTPFSPLVATSESVTEITASSFVVSWVSASDTVSGFRVEYELSEEGDEPQYLDLPSTATSVNIPDLLPGRKYIVNVYQISEDGEQSLILSTSQTTAPDAPPDPTVDQVDDTSIVVRWSRPQAPITGYRIVYSPSVEGSSTELNLPETANSVTLSDLQPGVQYNITIYAVEENQESTPVVIQQETTGTPRSDTVPSPRDLQFVEVTDVKVTIMWTPPESAVTGYRVDVIPVNLPGEHGQRLPISRNTFAEVTGLSPGVTYYFKVFAVSHGRESKPLTAQQTTKLDAPTNLQFVNETDSTVLVRWTPPRAQITGYRLTVGLTRRGQPRQYNVGPSVSKYPLRNLQPASEYTVSLVAIKGNQESPKATGVFTTLQPGSSIPPYNTEVTETTIVITWTPAPRIGFKLGVRPSQGGEAPREVTSDSGSIVVSGLTPGVEYVYTIQVLRDGQERDAPIVNKVVTPLSPPTNLHLEANPDTGVLTVSWERSTTPDITGYRITTTPTNGQQGNSLEEVVHADQSSCTFDNLSPGLEYNVSVYTVKDDKESVPISDTIIPAVPPPTDLRFTNIGPDTMRVTWAPPPSIDLTNFLVRYSPVKNEEDVAELSISPSDNAVVLTNLLPGTEYVVSVSSVYEQHESTPLRGRQKTGLDSPTGIDFSDITANSFTVHWIAPRATITGYRIRHHPEHFSGRPREDRVPHSRNSITLTNLTPGTEYVVSIVALNGREESPLLIGQQSTVSDVPRDLEVVAATPTSLLISWDAPAVTVRYYRITYGETGGNSPVQEFTVPGSKSTATISGLKPGVDYTITVYAVTGRGDSPASSKPISINYRTEIDKPSQMQVTDVQDNSISVKWLPSSSPVTGYRVTTTPKNGPGPTKTKTAGPDQTEMTIEGLQPTVEYVVSVYAQNPSGESQPLVQTAVTNIDRPKGLAFTDVDVDSIKIAWESPQGQVSRYRVTYSSPEDGIHELFPAPDGEEDTAELQGLRPGSEYTVSVVALHDDMESQPLIGTQSTAIPAPTDLKFTQVTPTSLSAQWTPPNVQLTGYRVRVTPKEKTGPMKEINLAPDSSSVVVSGLMVATKYEVSVYALKDTLTSRPAQGVVTTLENVSPPRRARVTDATETTITISWRTKTETITGFQVDAVPANGQTPIQRTIKPDVRSYTITGLQPGTDYKIYLYTLNDNARSSPVVIDASTAIDAPSNLRFLATTPNSLLVSWQPPRARITGYIIKYEKPGSPPREVVPRPRPGVTEATITGLEPGTEYTIYVIALKNNQKSEPLIGRKKTDELPQLVTLPHPNLHGPEILDVPSTVQKTPFVTHPGYDTGNGIQLPGTSGQQPSVGQQMIFEEHGFRRTTPPTTATPIRHRPRPYPPNVGEEIQIGHIPREDVDYHLYPHGPGLNPNASTGQEALSQTTISWAPFQDTSEYIISCHPVGTDEEPLQFRVPGTSTSATLTGLTRGATYNIIVEALKDQQRHKVREEVVTVGNSVNEGLNQPTDDSCFDPYTVSHYAVGDEWERMSESGFKLLCQCLGFGSGHFRCDSSRWCHDNGVNYKIGEKWDRQGENGQMMSCTCLGNGKGEFKCDPHEATCYDDGKTYHVGEQWQKEYLGAICSCTCFGGQRGWRCDNCRRPGGEPSPEGTTGQSYNQYSQRYHQRTNTNVNCPIECFMPLDVQADREDSRE

SEQ ID NO: 16 - protein, 2647 aa, Homo sapiens
MSSSHSRAGQSAAGAAPGGGVDTRDAEMPATEKDLAEDAPWKKIQQNTFTRWCNEHLKCVSKRIANLQTDLSDGLRLIALLEVLSQKKMHRKHNQRPTFRQMQLENVSVALEFLDRESIKLVSIDSKAIVDGNLKLILGLIWTLILHYSISMPMWDEEEDEEAKKQTPKQRLLGWIQNKLPQLPITNFSRDWQSGRALGALVDSCAPGLCPDWDSWDASKPVTNAREAMQQADDWLGIPQVITPEEIVDPNVDEHSVMTYLSQFPKAKLKPGAPLRPKLNPKKARAYGPGIEPTGNMVKKRAEFTVETRSAGQGEVLVYVEDPAGHQEEAKVTANNDKNRTFSVWYVPEVTGTHKVTVLFAGQHIAKSPFEVYVDKSQGDASKVTAQGPGLEPSGNIANKTTYFEIFTAGAGTGEVEVVIQDPMGQKGTVEPQLEARGDSTYRCSYQPTMEGVHTVHVTFAGVPIPRSPYTVTVGQACNPSACRAVGRGLQPKGVRVKETADFKVYTKGAGSGELKVTVKGPKGEERVKQKDLGDGVYGFEYYPMVPGTYIVTITWGGQNIGRSPFEVKVGTECGNQKVRAWGPGLEGGVVGKSADFVVEAIGDDVGTLGFSVEGPSQAKIECDDKGDGSCDVRYWPQEAGEYAVHVLCNSEDIRLSPFMADIRDAPQDFHPDRVKARGPGLEKTGVAVNKPAEFTVDAKHGGKAPLRVQVQDNEGCPVEALVKDNGNGTYSCSYVPRKPVKHTAMVSWGGVSIPNSPFRVNVGAGSHPNKVKVYGPGVAKTGLKAHEPTYFTVDCAEAGQGDVSIGIKCAPGVVGPAEADIDFDIIRNDNDTFTVKYTPRGAGSYTIMVLFADQATPTSPIRVKVEPSHDASKVKAEGPGLSRTGVELGKPTHFTVNAKAAGKGKLDVQFSGLTKGDAVRDVDIIDHHDNTYTVKYTPVQQGPVGVNVTYGGDPIPKSPFSVAVSPSLDLSKIKVSGLGEKVDVGKDQEFTVKSKGAGGQGKVASKIVGPSGAAVPCKVEPGLGADNSVVRFLPREEGPYEVEVTYDGVPVPGSPFPLEAVAPTKPSKVKAFGPGLQGGSAGSPARFTIDTKGAGTGGLGLTVEGPCEAQLECLDNGDGTCSVSYVPTEPGDYNINILFADTHIPGSPFKAHVVPCFDASKVKCSGPGLERATAGEVGQFQVDCSSAGSAELTIEICSEAGLPAEVYIQDHGDGTHTITYIPLCPGAYTVTIKYGGQPVPNFPSKLQVEPAVDTSGVQCYGPGIEGQGVFREATTEFSVDARALTQTGGPHVKARVANPSGNLTETYVQDRGDGMYKVEYTPYEEGLHSVDVTYDGSPVPSSPFQVPVTEGCDPSRVRVHGPGIQSGTTNKPNKFTVETRGAGTGGLGLAVEGPSEAKMSCMDNKDGSCSVEYIPYEAGTYSLNVTYGGHQVPGSPFKVPVHDVTDASKVKCSGPGLSPGMVRANLPQSFQVDTSKAGVAPLQVKVQGPKGLVEPVDVVDNADGTQTVNYVPSREGPYSISVLYGDEEVPRSPFKVKVLPTHDASKVKASGPGLNTTGVPASLPVEFTIDAKDAGEGLLAVQITDPEGKPKKTHIQDNHDGTYTVAYVPDVTGRYTILIKYGGDEIPFSPYRVRAVPTGDASKCTVTVSIGGHGLGAGIGPTIQIGEETVITVDTKAAGKGKVTCTVCTPDGSEVDVDVVENEDGTFDIFYTAPQPGKYVICVRFGGEHVPNSPFQVTALAGDQPSVQPPLRSQQLAPQYTYAQGGQQTWAPERPLVGVNGLDVTSLRPFDLVIPFTIKKGEITGEVRMPSGKVAQPTITDNKDGTVTVRYAPSEAGLHEMDIRYDNMHIPGSPLQFYVDYVNCGHVTAYGPGLTHGVVNKPATFTVNTKDAGEGGLSLAIEGPSKAEISCTDNQDGTCSVSYLPVLPGDYSILVKYNEQHVPGSPFTARVTGDDSMRMSHLKVGSAADIPINISETDLSLLTATVVPPSGREEPCLLKRLRNGHVGISFVPKETGEHLVHVKKNGQHVASSPIPVVISQSEIGDASRVRVSGQGLHEGHTFEPAEFIIDTRDAGYGGLSLSIEGPSKVDINTEDLEDGTCRVTYCPTEPGNYIINIKFADQHVPGSPFSVKVTGEGRVKESITRRRRAPSVANVGSHCDLSLKIPEISIQDMTAQVTSPSGKTHEAEIVEGENHTYCIRFVPAEMGTHTVSVKYKGQHVPGSPFQFTVGPLGEGGAHKVRAGGPGLERAEAGVPAEFSIWTREAGAGGLAIAVEGPSKAEISFEDRKDGSCGVAYVVQEPGDYEVSVKFNEEHIPDSPFVVPVASPSGDARRLTVSSLQESGLKVNQPASFAVSLNGAKGAIDAKVHSPSGALEECYVTEIDQDKYAVRFIPRENGVYLIDVKFNGTHIPGSPFKIRVGEPGHGGDPGLVSAYGAGLEGGVTGNPAEFVVNTSNAGAGALSVTIDGPSKVKMDCQECPEGYRVTYTPMAPGSYLISIKYGGPYHIGGSPFKAKVTGPRLVSNHSLHETSSVFVDSLTKATCAPQHGAPGPGPADASKVVAKGLGLSKAYVGQKSSFTVDCSKAGNNMLLVGVHGPRTPCEEILVKHVGSRLYSVSYLLKDKGEYTLVVKWGDEHIPGSPYRVVVP

SEQ ID NO: 17 - protein, 499 aa, Homo sapiens
MKHSLNALLIFLIITSAWGGSKGPLDQLEKGGETAQSADPQWEQLNNKNLSMPLLPADFHKENTVTNDWIPEGEEDDDYLDLEKIFSEDDDYIDIVDSLSVSPTDSDVSAGNILQLFHGKSRIQRLNILNAKFAFNLYRVLKDQVNTFDNIFIAPVGISTAMGMISLGLKGETHEQVHSILHFKDFVNASSKYEITTIHNLFRKLTHRLFRRNFGYTLRSVNDLYIQKQFPILLDFKTKVREYYFAEAQIADFSDPAFISKTNNHIMKLTKGLIKDALENIDPATQMMILNCIYFKGSWVNKFPVEMTHNHNFRLNEREVVKVSMMQTKGNFLAANDQELDCDILQLEYVGGISMLIVVPHKMSGMKTLEAQLTPRVVERWQKSMTNRTREVLLPKFKLEKNYNLVESLKLMGIRMLFDKNGNMAGISDQRIAIDLFKHQGTITVNEEGTQATTVTTVGFMPLSTQVRFTVDRPFLFLIYEHRTSCLLFMGRVANPSRS

SEQ ID NO: 18 - protein, 711 aa, Homo sapiens
MGWLPLLLLLTQCLGVPGQRSPLNDFQVLRGTELQHLLHAVVPGPWQEDVADAEECAGRCGPLMDCRAFHYNVSSHGCQLLPWTQHSPHTRLRRSGRCDLFQKKDYVRTCIMNNGVGYRGTMATTVGGLPCQAWSHKFPNDHKYTPTLRNGLEENFCRNPDGDPGGPWCYTTDPAVRFQSCGIKSCREAACVWCNGEEYRGAVDRTESGRECQRWDLQHPHQHPFEPGKFLDQGLDDNYCRNPDGSERPWCYTTDPQIEREFCDLPRCGSEAQPRQEATTVSCFRGKGEGYRGTANTTTAGVPCQRWDAQIPHQHRFTPEKYACKDLRENFCRNPDGSEAPWCFTLRPGMRAAFCYQIRRCTDDVRPQDCYHGAGEQYRGTVSKTRKGVQCQRWSAETPHKPQFTFTSEPHAQLEENFCRNPDGDSHGPWCYTMDPRTPFDYCALRRCADDQPPSILDPPDQVQFEKCGKRVDRLDQRRSKLRVVGGHPGNSPWTVSLRNRQGQHFCGGSLVKEQWILTARQCFSSCHMPLTGYEVWLGTLFQNPQHGEPSLQRVPVAKMVCGPSGSQLVLLKLERSVTLNQRVALICLPPEWYVVPPGTKCEIAGWGETKGTGNDTVLNVALLNVISNQECNIKHRGRVRESEMCTEGLLAPVGACEGDYGGPLACFTHNCWVLEGIIIPNRVCARSRWPAVFTRVSVFVDWIHKVMRLG

SEQ ID NO: 19 - protein, 525 aa, Homo sapiens
MKALIAALLLITLQYSCAVSPTDCSAVEPEAEKALDLINKRRRDGYLFQLLRIADAHLDRVENTTVYYLVLDVQESDCSVLSRKYWNDCEPPDSRRPSEIVIGQCKVIATRHSHESQDLRVIDFNCTTSSVSSALANTKDSPVLIDFFEDTERYRKQANKALEKYKEENDDFASFRVDRIERVARVRGGEGTGYFVDFSVRNCPRHHFPRHPNVFGFCRADLFYDVEALDLESPKNLVINCEVFDPQEHENINGVPPHLGHPFHWGGHERSSTTKPPFKPHGSRDHHHPHKPHEHGPPPPPDERDHSHGPPLPQGPPPLLPMSCSSCQHATFGTNGAQRHSHNNNSSDLHPHKHHSHEQHPHGHHPHAHHPHEHDTHRQHPHGHHPHGHHPHGHHPHGHHPHGHHPHCHDFQDYGPCDPPPHNQGHCCHGHGPPPGHLRRRGPGKGPRPFHCRQIGSVYRLPPLRKGEVLPLPEANFPSFPLPHHKHPLKPDNQPFPQSVSESCPGKFKSGFPQVSMFFTHTFPK

SEQ ID NO: 20 - protein, 328 aa, Homo sapiens
MLPRVGCPALPLPPPPLLPLLPLLLLLLGASGGGGGARAEVLFRCPPCTPERLAACGPPPVAPPAAVAAVAGGARMPCAELVREPGCGCCSVCARLEGEACGVYTPRCGQGLRCYPHPGSELPLQALVMGEGTCEKRRDAEYGASPEQVADNGDDHSEGGLVENHVDSTMNMLGGGGSAGRKPLKSGMKELAVFREKVTEQHRQMGKGGKHHLGLEEPKKLRPPPARTPCQQELDQVLERISTMRLPDERGPLEHLYSLHIPNCDKHGLYNLKQCKMSLNGQRGECWCVNPNTGKLIQGAPTIRGDPECHLFYNEQQEARGVHTQRMQ

SEQ ID NO: 21 - protein, 1786 aa, Homo sapiens
MGLLQLLAFSFLALCRARVRAQEPEFSYGCAEGSCYPATGDLLIGRAQKLSVTSTCGLHKPEPYCIVSHLQEDKKCFICNSQDPYHETLNPDSHLIENVVTTFAPNRLKIWWQSENGVENVTIQLDLEAEFHFTHLIMTFKTFRPAAMLIERSSDFGKTWGVYRYFAYDCEASFPGISTGPMKKVDDIICDSRYSDIEPSTEGEVIFRALDPAFKIEDPYSPRIQNLLKITNLRIKFVKLHTLGDNLLDSRMEIREKYYYAVYDMVVRGNCFCYGHASECAPVDGFNEEVEGMVHGHCMCRHNTKGLNCELCMDFYHDLPWRPAEGRNSNACKKCNCNEHSISCHFDMAVYLATGNVSGGVCDDCQHNTMGRNCEQCKPFYYQHPERDIRDPNFCERCTCDPAGSQNEGICDSYTDFSTGLIAGQCRCKLNVEGEHCDVCKEGFYDLSSEDPFGCKSCACNPLGTIPGGNPCDSETGHCYCKRLVTGQHCDQCLPEHWGLSNDLDGCRPCDCDLGGALNNSCFAESGQCSCRPHMIGRQCNEVEPGYYFATLDHYLYEAEEANLGPGVSIVERQYIQDRIPSWTGAGFVRVPEGAYLEFFIDNIPYSMEYDILIRYEPQLPDHWEKAVITVQRPGRIPTSSRCGNTIPDDDNQVVSLSPGSRYVVLPRPVCFEKGTNYTVRLELPQYTSSDSDVESPYTLIDSLVLMPYCKSLDIFTVGGSGDGVVTNSAWETFQRYRCLENSRSVVKTPMTDVCRNIIFSISALLHQTGLACECDPQGSLSSVCDPNGGQCQCRPNVVGRTCNRCAPGTFGFGPSGCKPCECHLQGSVNAFCNPVTGQCHCFQGVYARQCDRCLPGHWGFPSCQPCQCNGHADDCDPVTGECLNCQDYTMGHNCERCLAGYYGDPIIGSGDHCRPCPCPDGPDSGRQFARSCYQDPVTLQLACVCDPGYIGSRCDDCASGYFGNPSEVGGSCQPCQCHNNIDTTDPEACDKETGRCLKCLYHTEGEHCQFCRFGYYGDALRQDCRKCVCNYLGTVQEHCNGSDCQCDKATGQCLCLPNVIGQNCDRCAPNTWQLASGTGCDPCNCNAAHSFGPSCNEFTGQCQCMPGFGGRTCSECQELFWGDPDVECRACDCDPRGIETPQCDQSTGQCVCVEGVEGPRCDKCTRGYSGVFPDCTPCHQCFALWDVIIAELTNRTHRFLEKAKALKISGVIGPYRETVDSVERKVSEIKDILAQSPAAEPLKNIGNLFEEAEKLIKDVTEMMAQVEVKLSDTTSQSNSTAKELDSLQTEAESLDNTVKELAEQLEFIKNSDIRGALDSITKYFQMSLEAEERVNASTTEPNSTVEQSALMRDRVEDVMMERESQFKEKQEEQARLLDELAGKLQSLDLSAAAEMTCGTPPGASCSETECGGPNCRTDEGERKCGGPGCGGLVTVAHNAWQKAMDLDQDVLSALAEVEQLSKMVSEAKLRADEAKQSAEDILLKTNATKEKMDKSNEELRNLIKQIRNFLTQDSADLDSIEAVANEVLKMEMPSTPQQLQNLTEDIRERVESLSQVEVILQHSAADIARAEMLLEEAKRASKSATDVKVTADMVKEALEEAEKAQVAAEKAIKQADEDIQGTQNLLTSIESETAASEETLFNASQRISELERNVEELKRKAAQNSGEAEYIEKVVYTVKQSAEDVKKTLDGELDEKYKKVENLIAKKTEESADARRKAEMLQNEAKTLLAQANSKLQLLKDLERKYEDNQRYLEDKAQELARLEGEVRSLLKDISQKVAVYSTCL

SEQ ID NO: 22 - protein, 481 aa, Homo sapiens
MGALARALPSILLALLLTSTPEALGANPGLVARITDKGLQYAAQEGLLALQSELLRITLPDFTGDLRIPHVGRGRYEFHSLNIHSCELLHSALRPVPGQGLSLSISDSSIRVQGRWKVRKSFFKLQGSFDVSVKGISISVNLLLGSESSGRPTVTASSCSSDIADVEVDMSGDLGWLLNLFHNQIESKFQKVLESRICEMIQKSVSSDLQPYLQTLPVTTEIDSFADIDYSLVEAPRATAQMLEVMFKGEIFHRNHRSPVTLLAAVMSLPEEHNKMVYFAISDYVFNTASLVYHEEGYLNFSITDDMIPPDSNIRLTTKSFRPFVPRLARLYPNMNLELQGSVPSAPLLNFSPGNLSVDPYMEIDAFVLLPSSSKEPVFRLSVATNVSATLTFNTSKITGFLKPGKVKVELKESKVGLFNAELLEALLNYYILNTFYPKFNDKLAEGFPLPLLKRVQLYDLGLQIHKDFLFLGANVQYMRV

SEQ ID NO: 23 - protein, 707 aa, Homo sapiens
MSLWQPLVLVLLVLGCCFAAPRQRQSTLVLFPGDLRTNLTDRQLAEEYLYRYGYTRVAEMRGESKSLGPALLLLQKQLSLPETGELDSATLKAMRTPRCGVPDLGRFQTFEGDLKWHHHNITYWIQNYSEDLPRAVIDDAFARAFALWSAVTPLTFTRVYSRDADIVIQFGVAEHGDGYPFDGKDGLLAHAFPPGPGIQGDAHFDDDELWSLGKGVVVPTRFGNADGAACHFPFIFEGRSYSACTTDGRSDGLPWCSTTANYDTDDRFGFCPSERLYTRDGNADGKPCQFPFIFQGQSYSACTTDGRSDGYRWCATTANYDRDKLFGFCPTRADSTVMGGNSAGELCVFPFTFLGKEYSTCTSEGRGDGRLWCATTSNFDSDKKWGFCPDQGYSLFLVAAHEFGHALGLDHSSVPEALMYPMYRFTEGPPLHKDDVNGIRHLYGPRPEPEPRPPTTTTPQPTAPPTVCPTGPPTVHPSERPTAGPTGPPSAGPTGPPTAGPSTATTVPLSPVDDACNVNIFDAIAEIGNQLYLFKDGKYWRFSEGRGSRPQGPFLIADKWPALPRKLDSVFEEPLSKKLFFFSGRQVWVYTGASVLGPRRLDKLGLGADVAQVTGALRSGRGKMLLFSGRRLWRFDVKAQMVDPRSASEVDRMFPGVPLDTHDVFQYREKAYFCQDRFYWRVSSRSELNQVDQVGYVTYDILQCPED

SEQ ID NO: 24 - protein, 627 aa, Homo sapiens
MARGSVSDEEMMELREAFAKVDTDGNGYISFNELNDLFKAACLPLPGYRVREITENLMATGDLDQDGRISFDEFIKIFHGLKSTDVAKTFRKAINKKEGICAIGGTSEQSSVGTQHSYSEEEKYAFVNWINKALENDPDCRHVIPMNPNTNDLFNAVGDGIVLCKMINLSVPDTIDERTINKKKLTPFTIQENLNLALNSASAIGCHVVNIGAEDLKEGKPYLVLGLLWQVIKIGLFADIELSRNEALIALLREGESLEDLMKLSPEELLLRWANYHLENAGCNKIGNFSTDIKDSKAYYHLLEQVAPKGDEEGVPAVVIDMSGLREKDDIQRAECMLQQAERLGCRQFVTATDVVRGNPKLNLAFIANLFNRYPALHKPENQDIDWGALEGETREERTFRNWMNSLGVNPRVNHLYSDLSDALVIFQLYEKIKVPVDWNRVNKPPYPKLGGNMKKLENCNYAVELGKNQAKFSLVGIGGQDLNEGNRTLTLALIWQLMRRYTLNILEEIGGGQKVNDDIIVNWVNETLREAEKSSSISSFKDPKISTSLPVLDLIDAIQPGSINYDLLKTENLNDDEKLNNAKYAISMARKIGARVYALPEDLVEVNPKMVMTVFACLMGKGMKRV

SEQ ID NO: 25 - protein, 140 aa, Homo sapiens
MAGWNAYIDNLMADGTCQDAAIVGYKDSPSVWAAVPGKTFVNITPAEVGVLVGKDRSSFYVNGLTLGGQKCSVIRDSLLQDGEFSMDLRTKSTGGAPTFNVTVTKTDKTLVLLMGKEGVHGGLINKKCYEMASHLRRSQY

SEQ ID NO: 26 - protein, 419 aa, Homo sapiens
MGTLSAPPCTQRIKWKGLLLTASLLNFWNLPTTAQVTIEAEPTKVSEGKDVLLLVHNLPQNLTGYIWYKGQMRDLYHYITSYVVDGEIIIYGPAYSGRETAYSNASLLIQNVTREDAGSYTLHIIKGDDGTRGVTGRFTFTLHLETPKPSISSSNLNPRETMEAVSLTCDPETPDASYLWWMNGQSLPMTHSLKLSETNRTLFLLGVTKYTAGPYECEIRNPVSASRSDPVTLNLLPKLPKPYITINNLNPRENKDVLNFTCEPKSENYTYIWWLNGQSLPVSPRVKRPIENRILILPSVTRNETGPYQCEIRDRYGGIRSDPVTLNVLYGPDLPRIYPSFTYYRSGEVLYLSCSADSNPPAQYSWTINEKFQLPGQKLFIRHITTKHSGLYVCSVRNSATGKESSKSMTVEVSDWTVP

SEQ ID NO: 27 - protein, 1445 aa, Homo sapiens
MRRLLEPCWWILFLKITSSVLHYVVCFPALTEGYVGALHENRHGSAVQIRRRKASGDPYWAYSGAYGPEHWVTSSVSCGGRHQSPIDILDQYARVGEEYQELQLDGFDNESSNKTWMKNTGKTVAILLKDDYFVSGAGLPGRFKAEKVEFHWGHSNGSAGSEHSINGRRFPVEMQIFFYNPDDFDSFQTAISENRIIGAMAIFFQVSPRDNSALDPIIHGLKGVVHHEKETFLDPFVLRDLLPASLGSYYRYTGSLTTPPCSEIVEWIVFRRPVPISYHQLEAFYSIFTTEQQDHVKSVEYLRNNFRPQQRLHDRVVSKSAVRDSWNHDMTDFLENPLGTEASKVCSSPPIHMKVQPLNQTALQVSWSQPETIYHPPIMNYMISYSWTKNEDEKEKTFTKDSDKDLKATISHVSPDSLYLFRVQAVCRNDMRSDFSQTMLFQANTTRIFQGTRIVKTGVPTASPASSADMAPISSGSSTWTSSGIPFSFVSMATGMGPSSSGSQATVASVVTSTLLAGLGFGGGGISSFPSTVWPTRLPTAASASKQAARPVLATTEALASPGPDGDSSPTKDGEGTEEGEKDEKSESEDGEREHEEDGEKDSEKKEKSGVTHAAEERNQTEPSPTPSSPNRTAEGGHQTIPGHEQDHTAVPTDQTGGRRDAGPGLDPDMVTSTQVPPTATEEQYAGSDPKRPEMPSKKPMSRGDRFSEDSRFITVNPAEKNTSGMISRPAPGRMEWIIPLIVVSALTFVCLILLIAVLVYWRGCNKIKSKGFPRRFREVPSSGERGEKGSRKCFQTAHFYVEDSSSPRVVPNESIPIIPIPDDMEAIPVKQFVKHIGELYSNNQHGFSEDFEEVQRCTADMNITAEHSNHPENKHKNRYINILAYDHSRVKLRPLPGKDSKHSDYINANYVDGYNKAKAYIATQGPLKSTFEDFWRMIWEQNTGIIVMITNLVEKGRRKCDQYWPTENSEEYGNIIVTLKSTKIHACYTVRRFSIRNTKVKKGQKGNPKGRQNERVVIQYHYTQWPDMGVPEYALPVLTFVRRSSAARMPETGPVLVHCSAGVGRTGTYIVIDSMLQQIKDKSTVNVLGFLKHIRTQRNYLVQTEEQYIFIHDALLEAILGKETEVSSNQLHSYVNSILIPGVGGKTRLEKQFKLVTQCNAKYVECFSAQKECNKEKNRNSSVVPSERARVGLAPLPGMKGTDYINASYIMGYYRSNEFIITQHPLPHTTKDFWRMIWDHNAQIIVMLPDNQSLAEDEFVYWPSREESMNCEAFTVTLISKDRLCLSNEEQIIIHDFILEATQDDYVLEVRHFQCPKWPNPDAPISSTFELINVIKEEALTRDGPTIVHDEYGAVSAGMLCALTTLSQQLENENAVDVFQVAKMINLMRPGVFTDIEQYQFIYKARLSLVSTKENGNGPMTVDKNGAVLIADESDPAESMESLV

SEQ ID NO: 28 - protein, 1482 aa, Homo sapiens
MRKDRLLHLCLVLLLILLSASDSNSTEPQYMVLVPSLLHTEAPKKGCVLLSHLNETVTVSASLESGRENRSLFTDLVAEKDLFHCVSFTLPRISASSEVAFLSIQIKGPTQDFRKRNTVLVLNTQSLVFVQTDKPMYKPGQTVRFRVVSVDENFRPRNELIPLIYLENPRRNRIAQWQSLKLEAGINQLSFPLSSEPIQGSYRVVVQTESGGRIQHPFTVEEFVLPKFEVKVQVPKIISIMDEKVNITVCGEYTYGKPVPGLATVSLCRKLSRVLNCDKQEVCEEFSQQLNSNGCITQQVHTKMLQITNTGFEMKLRVEARIREEGTDLEVTANRISEITNIVSKLKFVKVDSHFRQGIPFFAQVLLVDGKGVPIPNKLFFISVNDANYYSNATTNEQGLAQFSINTTSISVNKLFVRVFTVHPNLCFHYSWVAEDHQGAQHTANRVFSLSGSYIHLEPVAGTLPCGHTETITAHYTLNRQAMGELSELSFHYLIMAKGVIVRSGTHTLPVESGDMKGSFALSFPVESDVAPIARMFIFAILPDGEVVGDSEKFEIENCLANKVDLSFSPAQSPPASHAHLQVAAAPQSLCALRAVDQSVLLMKPEAELSVSSVYNLLTVKDLTNFPDNVDQQEEEQGHCPRPFFIHNGAIYVPLSSNEADIYSFLKGMGLKVFTNSKIRKPKSCSVIPSVSAGAVGQGYYGAGLGVVERPYVPQLGTYNVIPLNNEQSSGPVPETVRSYFPETWIWELVAVNSSGVAEVGVTVPDTITEWKAGAFCLSEDAGLGISSTASLRAFQPFFVELTMPYSVIRGEVFTLKATVLNYLPKCIRVSVQLKASPAFLASQNTKGEESYCICGSERQTLSWTVTPKTLGNVNFSVSAEAMQSLELCGNEVVEVPEIKRKDTVIKTLLVEAEGIEQEKTFSSMTCASGANVSEQLSLKLPSNVVKESARASFSVLGDILGSAMQNIQNLLQMPYGCGEQNMVLFAPNIYVLNYLNETQQLTQEIKAKAVGYLITGYQRQLNYKHQDGSYSTFGERYGRNQGNTWLTAFVLKTFAQARSYIFIDEAHITQSLTWLSQMQKDNGCFRSSGSLLNNAIKGGVEDEATLSAYVTIALLEIPLPVTNPIVRNALFCLESAWNVAKEGTHGSHVYTKALLAYAFSLLGKQNQNREILNSLDKEAVKEDNLVHWERPQRPKAPVGHLYQTQAPSAEVEMTSYVLLAYLTAQPAPTSGDLTSATNIVKWIMKQQNAQGGFSSTQDTVVALHALSRYGAATFTRTEKTAQVTVQDSQTFSTNFQVDNNNLLLLQQISLPELPGEYVITVTGERCVYLQTSMKYNILPEKEDSPFALKVQTVPQTCDGHKAHTSFQISLTISYTGNRPASNMVIVDVKMVSGFIPLKPTVKMLERSSSVSRTEVSNNHVLIYVEQVTNQTLSFSFMVLQDIPVGDLKPAIVKVYDYYETDESVVAEYIAPCSTDTEHGNV

SEQ ID NO: 29 - protein, 201 aa, Homo sapiens
MKWVWALLLLAALGSGRAERDCRVSSFRVKENFDKARFSGTWYAMAKKDPEGLFLQDNIVAEFSVDETGQMSATAKGRVRLLNNWDVCADMVGTFTDTEDPAKFKMKYWGVASFLQKGNDDHWIVDTDYDTYAVQYSCRLLNLDGTCADSYSFVFSRDPNGLPPEAQKIVRQRQEELCLARQYRLIVHNGYCDGRSERNLL

SEQ ID NO: 30 - protein, 93 aa, Homo sapiens
MSGLRVYSTSVTGSREIKSQQSEVTRILDGKRIQYQLVDISQDNALRDEMRALAGNPKATPPQIVNGDQYCGDYELFVEAVEQNTLQEFLKLA

SEQ ID NO: 31 - protein, 199 aa, Homo sapiens
MANRGPAYGLSREVQQKIEKQYDADLEQILIQWITTQCRKDVGRPQPGRENFQNWLKDGTVLCELINALYPEGQAPVKKIQASTMAFKQMEQISQFLQAAERYGINTTDIFQTVDLWEGKNMACVQRTLMNLGGLAVARDDGLFSGDPNWFPKKSKENPRNFSDNQLQEGKNVIGLQMGTNRGASQAGMTGYGMPRQIL

SEQ ID NO: 32 - protein, 2541 aa, Homo sapiens
MVALSLKISIGNVVKTMQFEPSTMVYDACRIIRERIPEAPAGPPSDFGLFLSDDDPKKGIWLEAGKALDYYMLRNGDTMEYRKKQRPLKIRMLDGTVKTIMVDDSKTVTDMLMTICARIGITNHDEYSLVRELMEEKKEEITGTLRKDKTLLRDEKKMEKLKQKLHTDDELNWLDHGRTLREQGVEEHETLLLRRKFFYSDQNVDSRDPVQLNLLYVQARDDILNGSHPVSFDKACEFAGFQCQIQFGPHNEQKHKAGFLDLKDFLPKEYVKQKGERKIFQAHKNCGQMSEIEAKVRYVKLARSLKTYGVSFFLVKEKMKGKNKLVPRLLGITKECVMRVDEKTKEVIQEWNLTNIKRWAASPKSFTLDFGDYQDGYYSVQTTEGEQIAQLIAGYIDIILKKKKSKDHFGLEGDEESTMLEDSVSPKKSTVLQQQYNRVGKVEHGSVALPAIMRSGASGPENFQVGSMPPAQQQITSGQMHRGHMPPLTSAQQALTGTINSSMQAVQAAQATLDDFDTLPPLGQDAASKAWRKNKMDESKHEIHSQVDAITAGTASVVNLTAGDPAETDYTAVGCAVTTISSNLTEMSRGVKLLAALLEDEGGSGRPLLQAAKGLAGAVSELLRSAQPASAEPRQNLLQAAGNVGQASGELLQQIGESDTDPHFQDALMQLAKAVASAAAALVLKAKSVAQRTEDSGLQTQVIAAATQCALSTSQLVACTKVVAPTISSPVCQEQLVEAGRLVAKAVEGCVSASQAATEDGQLLRGVGAAATAVTQALNELLQHVKAHATGAGPAGRYDQATDTILTVTENIFSSMGDAGEMVRQARILAQATSDLVNAIKADAEGESDLENSRKLLSAAKILADATAKMVEAAKGAAAHPDSEEQQQRLREAAEGLRMATNAAAQNAIKKKLVQRLEHAAKQAAASATQTIAAAQHAASTPKASAGPQPLLVQSCKAVAEQIPLLVQGVRGSQAQPDSPSAQLALIAASQSFLQPGGKMVAAAKASVPTIQDQASAMQLSQCAKNLGTALAELRTAAQKAQEACGPLEMDSALSVVQNLEKDLQEVKAAARDGKLKPLPGETMEKCTQDLGNSTKAVSSAIAQLLGEVAQGNENYAGIAARDVAGGLRSLAQAARGVAALTSDPAVQAIVLDTASDVLDKASSLIEEAKKAAGHPGDPESQQRLAQVAKAVTQALNRCVSCLPGQRDVDNALRAVGDASKRLLSDSLPPSTGTFQEAQSRLNEAAAGLNQAATELVQASRGTPQDLARASGRFGQDFSTFLEAGVEMAGQAPSQEDRAQVVSNLKGISMSSSKLLLAAKALSTDPAAPNLKSQLAAAARAVTDSINQLITMCTQQAPGQKECDNALRELETVRELLENPVQPINDMSYFGCLDSVMENSKVLGEAMTGISQNAKNGNLPEFGDAISTASKALCGFTEAAAQAAYLVGVSDPNSQAGQQGLVEPTQFARANQAIQMACQSLGEPGCTQAQVLSAATIVAKHTSALCNSCRLASARTTNPTAKRQFVQSAKEVANSTANLVKTIKALDGAFTEENRAQCRAATAPLLEAVDNLSAFASNPEFSSIPAQISPEGRAAMEPIVISAKTMLESAGGLIQTARALAVNPRDPPSWSVLAGHSRTVSDSIKKLITSMRDKAPGQLECETAIAALNSCLRDLDQASLAAVSQQLAPREGISQEALHTQMLTAVQEISHLIEPLANAARAEASQLGHKVSQMAQYFEPLTLAAVGAASKTLSHPQQMALLDQTKTLAESALQLLYTAKEAGGNPKQAAHTQEALEEAVQMMTEAVEDLTTTLNEAASAAGVVGGMVDSITQAINQLDEGPMGEPEGSFVDYQTTMVRTAKAIAVTVQEMVTKSNTSPEELGPLANQLTSDYGRLASEAKPAAVAAENEEIGSHIKHRVQELGHGCAALVTKAGALQCSPSDAYTKKELIECARRVSEKVSHVLAALQAGNRGTQACITAASAVSGIIADLDTTIMFATAGTLNREGTETFADHREGILKTAKVLVEDTKVLVQNAAGSQEKLAQAAQSSVATITRLADVVKLGAASLGAEDPETQVVLINAVKDVAKALGDLISATKAAAGKVGDDPAVWQLKNSAKVMVTNVTSLLKTVKAVEDEATKGTRALEATTEHIRQELAVFCSPEPPAKTSTPEDFIRMTKGITMATAKAVAAGNSCRQEDVIATANLSRRAIADMLRACKEAAYHPEVAPDVRLRALHYGRECANGYLELLDHVLLTLQKPSPELKQQLTGHSKRVAGSVTELIQAAEAMKGTEWVDPEDPTVIAENELLGAAAAIEAAAKKLEQLKPRAKPKEADESLNFEEQILEAAKSIAAATSALVKAASAAQRELVAQGKVGAIPANALDDGQWSQGLISAARMVAAATNNLCEAANAAVQGHASQEKLISSAKQVAASTAQLLVACKVKADQDSEAMKRLQAAGNAVKRASDNLVKAAQKAAAFEEQENETVVVKEKMVGGIAQIIAAQEEMLRKERELEEARKKLAQIRQQQYKFLPSELRDEH

SEQ ID NO: 33 - protein, 248 aa, Homo sapiens
MAGLNSLEAVKRKIQALQQQADEAEDRAQGLQRELDGERERREKAEGDVAALNRRIQLVEEELDRAQERLATALQKLEEAEKAADESERGMKVIENRAMKDEEKMEIQEMQLKEAKHIAEEADRKYEEVARKLVILEGELERAEERAEVSELKCGDLEEELKNVTNNLKSLEAASEKYSEKEDKYEEEIKLLSDKLKEAETRAEFAERTVAKLEKTIDDLEEKLAQAKEENVGLHQTLDQTLNELNCI

SEQ ID NO: 34 - protein, 673 aa, Homo sapiens
MCSRVPLLLPLLLLLALGPGVQGCPSGCQCSQPQTVFCTARQGTTVPRDVPPDTVGLYVFENGITMLDAGSFAGLPGLQLLDLSQNQIASLPSGVFQPLANLSNLDLTANRLHEITNETFRGLRRLERLYLGKNRIRHIQPGAFDTLDRLLELKLQDNELRALPPLRLPRLLLLDLSHNSLLALEPGILDTANVEALRLAGLGLQQLDEGLFSRLRNLHDLDVSDNQLERVPPVIRGLRGLTRLRLAGNTRIAQLRPEDLAGLAALQELDVSNLSLQALPGDLSGLFPRLRLLAAARNPFNCVCPLSWFGPWVRESHVTLASPEETRCHFPPKNAGRLLLELDYADFGCPATTTTATVPTTRPVVREPTALSSSLAPTWLSPTEPATEAPSPPSTAPPTVGPVPQPQDCPPSTCLNGGTCHLGTRHHLACLCPEGFTGLYCESQMGQGTRPSPTPVTPRPPRSLTLGIEPVSPTSLRVGLQRYLQGSSVQLRSLRLTYRNLSGPDKRLVTLRLPASLAEYTVTQLRPNATYSVCVMPLGPGRVPEGEEACGEAHTPPAVHSNHAPVTQAREGNLPLLIAPALAAVLLAALAAVGAAYCVRRGRAMAAAAQDKGQVGPGAGPLELEGVKVPLEPGPKATEGGGEALPSGSECEVPLMGFPGPGLQSPLHAKPYI

SEQ ID NO: 35 - protein, 1298 aa, Homo sapiens
MQRGAALCLRLWLCLGLLDGLVSGYSMTPPTLNITEESHVIDTGDSLSISCRGQHPLEWAWPGAQEAPATGDKDSEDTGVVRDCEGTDARPYCKVLLLHEVHANDTGSYVCYYKYIKARIEGTTAASSYVFVRDFEQPFINKPDTLLVNRKDAMWVPCLVSIPGLNVTLRSQSSVLWPDGQEVVWDDRRGMLVSTPLLHDALYLQCETTWGDQDFLSNPFLVHITGNELYDIQLLPRKSLELLVGEKLVLNCTVWAEFNSGVTFDWDYPGKQAERGKWVPERRSQQTHTELSSILTIHNVSQHDLGSYVCKANNGIQRFRESTEVIVHENPFISVEWLKGPILEATAGDELVKLPVKLAAYPPPEFQWYKDGKALSGRHSPHALVLKEVTEASTGTYTLALWNSAAGLRRNISLELVVNVPPQIHEKEASSPSIYSRHSRQALTCTAYGVPLPLSIQWHWRPWTPCKMFAQRSLRRRQQQDLMPQCRDWRAVTTQDAVNPIESLDTWTEFVEGKNKTVSKLVIQNANVSAMYKCVVSNKVGQDERLIYFYVTTIPDGFTIESKPSEELLEGQPVLLSCQADSYKYEHLRWYRLNLSTLHDAHGNPLLLDCKNVHLFATPLAASLEEVAPGARHATLSLSIPRVAPEHEGHYVCEVQDRRSHDKHCHKKYLSVQALEAPRLTQNLTDLLVNVSDSLEMQCLVAGAHAPSIVWYKDERLLEEKSGVDLADSNQKLSIQRVREEDAGRYLCSVCNAKGCVNSSASVAVEGSEDKGSMEIVILVGTGVIAVFFWVLLLLIFCNMRRPAHADIKTGYLSIIMDPGEVPLEEQCEYLSYDASQWEFPRERLHLGRVLGYGAFGKVVEASAFGIHKGSSCDTVAVKMLKEGATASEHRALMSELKILIHIGNHLNVVNLLGACTKPQGPLMVIVEFCKYGNLSNFLRAKRDAFSPCAEKSPEQRGRFRAMVELARLDRRRPGSSDRVLFARFSKTEGGARRASPDQEAEDLWLSPLTMEDLVCYSFQVARGMEFLASRKCIHRDLAARNILLSESDVVKICDFGLARDIYKDPDYVRKGSARLPLKWMAPESIFDKVYTTQSDVWSFGVLLWEIFSLGASPYPGVQINEEFCQRLRDGTRMRAPELATPAIRRIMLNCWSGDPKARPAFSELVEILGDLLQGRGLQEEEEVCMAPRSSQSSEEGSFSQVSTMALHIAQADAEDSPPSLQRHSLAARYYNWVSFPGCLARGAETRGSSRMKTFEEFPMTPTTYKGSVDNQTDSGMVLASEEFEQIESRHRQESGFR

SEQ ID NO: 36 - protein, 1134 aa, Homo sapiens
MPVFHTRTIESILEPVAQQISHLVIMHEEGEVDGKAIPDLTAPVAAVQAAVSNLVRVGKETVQTTEDQILKRDMPPAFIKVENACTKLVQAAQMLQSDPYSVPARDYLIDGSRGILSGTSDLLLTFDEAEVRKIIRVCKGILEYLTVAEVVETMEDLVTYTKNLGPGMTKMAKMIDERQQELTHQEHRVMLVNSMNTVKELLPVLISAMKIFVTTKNSKNQGIEEALKNRNFTVEKMSAEINEIIRVLQLTSWDEDAWASKDTEAMKRALASIDSKLNQAKGWLRDPSASPGDAGEQAIRQILDEAGKVGELCAGKERREILGTCKMLGQMTDQVADLRARGQGSSPVAMQKAQQVSQGLDVLTAKVENAARKLEAMTNSKQSIAKKIDAAQNWLADPNGGPEGEEQIRGALAEARKIAELCDDPKERDDILRSLGEISALTSKLADLRRQGKGDSPEARALAKQVATALQNLQTKTNRAVANSRPAKAAVHLEGKIEQAQRWIDNPTVDDRGVGQAAIRGLVAEGHRLANVMMGPYRQDLLAKCDRVDQLTAQLADLAARGEGESPQARALASQLQDSLKDLKARMQEAMTQEVSDVFSDTTTPIKLLAVAATAPPDAPNREEVFDERAANFENHSGKLGATAEKAAAVGTANKSTVEGIQASVKTARELTPQVVSAARILLRNPGNQAAYEHFETMKNQWIDNVEKMTGLVDEAIDTKSLLDASEEAIKKDLDKCKVAMANIQPQMLVAGATSIARRANRILLVAKREVENSEDPKFREAVKAASDELSKTISPMVMDAKAVAGNISDPGLQKSFLDSGYRILGAVAKVREAFQPQEPDFPPPPPDLEQLRLTDELAPPKPPLPEGEVPPPRPPPPEEKDEEFPEQKAGEVINQPMMMAARQLHDEARKWSSKPGIPAAEVGIGVVAEADAADAAGFPVPPDMEDDYEPELLLMPSNQPVNQPILAAAQSLHREATKWSSKGNDIIAAAKRMALLMAEMSRLVRGGSGTKRALIQCAKDIAKASDEVTRLAKEVAKQCTDKRIRTNLLQVCERIPTISTQLKILSTVKATMLGRTNISDEESEQATEMLVHNAQNLMQSVKETVREAEAASIKIRTDAGFTLRWVRKTPWYQ

SEQ ID NO: 37 - protein, 2813 aa, Homo sapiens
MIPARFAGVLLALALILPGTLCAEGTRGRSSTARCSLFGSDFVNTFDGSMYSFAGYCSYLLAGGCQKRSFSIIGDFQNGKRVSLSVYLGEFFDIHLFVNGTVTQGDQRVSMPYASKGLYLETEAGYYKLSGEAYGFVARIDGSGNFQVLLSDRYFNKTCGLCGNFNIFAEDDFMTQEGTLTSDPYDFANSWALSSGEQWCERASPPSSSCNISSGEMQKGLWEQCQLLKSTSVFARCHPLVDPEPFVALCEKTLCECAGGLECACPALLEYARTCAQEGMVLYGWTDHSACSPVCPAGMEYRQCVSPCARTCQSLHINEMCQERCVDGCSCPEGQLLDEGLCVESTECPCVHSGKRYPPGTSLSRDCNTCICRNSQWICSNEECPGECLVTGQSHFKSFDNRYFTFSGICQYLLARDCQDHSFSIVIETVQCADDRDAVCTRSVTVRLPGLHNSLVKLKHGAGVAMDGQDIQLPLLKGDLRIQHTVTASVRLSYGEDLQMDWDGRGRLLVKLSPVYAGKTCGLCGNYNGNQGDDFLTPSGLAEPRVEDFGNAWKLHGDCQDLQKQHSDPCALNPRMTRFSEEACAVLTSPTFEACHRAVSPLPYLRNCRYDVCSCSDGRECLCGALASYAAACAGRGVRVAWREPGRCELNCPKGQVYLQCGTPCNLTCRSLSYPDEECNEACLEGCFCPPGLYMDERGDCVPKAQCPCYYDGEIFQPEDIFSDHHTMCYCEDGFMHCTMSGVPGSLLPDAVLSSPLSHRSKRSLSCRPPMVKLVCPADNLRAEGLECTKTCQNYDLECMSMGCVSGCLCPPGMVRHENRCVALERCPCFHQGKEYAPGETVKIGCNTCVCRDRKWNCTDHVCDATCSTIGMAHYLTFDGLKYLFPGECQYVLVQDYCGSNPGTFRILVGNKGCSHPSVKCKKRVTILVEGGEIELFDGEVNVKRPMKDETHFEVVESGRYIILLLGKALSVVWDRHLSISVVLKQTYQEKVCGLCGNFDGIQNNDLTSSNLQVEEDPVDFGNSWKVSSQCADTRKVPLDSSPATCHNNIMKQTMVDSSCRILTSDVFQDCNKLVDPEPYLDVCIYDTCSCESIGDCACFCDTIAAYAHVCAQHGKVVTWRTATLCPQSCEERNLRENGYECEWRYNSCAPACQVTCQHPEPLACPVQCVEGCHAHCPPGKILDELLQTCVDPEDCPVCEVAGRRFASGKKVTLNPSDPEHCQICHCDVVNLTCEACQEPGGLVVPPTDAPVSPTTLYVEDISEPPLHDFYCSRLLDLVFLLDGSSRLSEAEFEVLKAFVVDMMERLRISQKWVRVAVVEYHDGSHAYIGLKDRKRPSELRRIASQVKYAGSQVASTSEVLKYTLFQIFSKIDRPEASRIALLLMASQEPQRMSRNFVRYVQGLKKKKVIVIPVGIGPHANLKQIRLIEKQAPENKAFVLSSVDELEQQRDEIVSYLCDLAPEAPPPTLPPHMAQVTVGPGLLGVSTLGPKRNSMVLDVAFVLEGSDKIGEADFNRSKEFMEEVIQRMDVGQDSIHVTVLQYSYMVTVEYPFSEAQSKGDILQRVREIRYQGGNRTNTGLALRYLSDHSFLVSQGDREQAPNLVYMVTGNPASDEIKRLPGDIQVVPIGVGPNANVQELERIGWPNAPILIQDFETLPREAPDLVLQRCCSGEGLQIPTLSPAPDCSQPLDVILLLDGSSSFPASYFDEMKSFAKAFISKANIGPRLTQVSVLQYGSITTIDVPWNVVPEKAHLLSLVDVMQREGGPSQIGDALGFAVRYLTSEMHGARPGASKAVVILVTDVSVDSVDAAADAARSNRVTVFPIGIGDRYDAAQLRILAGPAGDSNVVKLQRIEDLPTMVTLGNSFLHKLCSGFVRICMDEDGNEKRPGDVWTLPDQCHTVTCQPDGQTLLKSHRVNCDRGLRPSCPNSQSPVKVEETCGCRWTCPCVCTGSSTRHIVTFDGQNFKLTGSCSYVLFQNKEQDLEVILHNGACSPGARQGCMKSIEVKHSALSVELHSDMEVTVNGRLVSVPYVGGNMEVNVYGAIMHEVRFNHLGHIFTFTPQNNEFQLQLSPKTFASKTYGLCGICDENGANDFMLRDGTVTTDWKTLVQEWTVQRPGQTCQPILEEQCLVPDSSHCQVLLLPLFAECHKVLAPATFYAICQQDSCHQEQVCEVIASYAHLCRTNGVCVDWRTPDFCAMSCPPSLVYNHCEHGCPRHCDGNVSSCGDHPSEGCFCPPDKVMLEGSCVPEEACTQCIGEDGVQHQFLEAWVPDHQPCQICTCLSGRKVNCTTQPCPTAKAPTCGLCEVARLRQNADQCCPEYECVCDPVSCDLPPVPHCERGLQPTLTNPGECRPNFTCACRKEECKRVSPPSCPPHRLPTLRKTQCCDEYECACNCVNSTVSCPLGYLASTATNDCGCTTTTCLPDKVCVHRSTIYPVGQFWEEGCDVCTCTDMEDAVMGLRVAQCSQKPCEDSCRSGFTYVLHEGECCGRCLPSACEVVTGSPRGDSQSSWKSVGSQWASPENPCLINECVRVKEEVFIQQRNVSCPQLEVPVCPSGFQLSCKTSACCPSCRCERMEACMLNGTVIGPGKTVMIDVCTTCRCMVQVGVISGFKLECRKTTCNPCPLGYKEENNTGECCGRCLPTACTIQLRGGQIMTLKRDETLQDGCDTHFCKVNERGEYFWEKRVTGCPPFDEHKCLAEGGKIMKIPGTCCDTCEEPECNDITARLQYVKVGSCKSEVEVDIHYCQGKCASKAMYSIDINDVQDQCSCCSPTRTEPMQVALHCTNGSVVYHEVLNAMECKCSPRKCSK

SEQ ID NO: 38 - protein, 1791 aa, Homo sapiens
MMCLKILRISLAILAGWALCSANSELGWTRKKSLVEREHLNQVLLEGERCWLGAKVRRPRASPQHHLFGVYPSRAGNYLRPYPVGEQEIHHTGRSKPDTEGNAVSLVPPDLTENPAGLRGAVEEPAAPWVGDSPIGQSELLGDDDAYLGNQRSKESLGEAGIQKGSAMAATTTTAIFTTLNEPKPETQRRGWAKSRQRRQVWKRRAEDGQGDSGISSHFQPWPKHSLKHRVKKSPPEESNQNGGEGSYREAETFNSQVGLPILYFSGRRERLLLRPEVLAEIPREAFTVEAWVKPEGGQNNPAIIAGVFDNCSHTVSDKGWALGIRSGKDKGKRDARFFFSLCTDRVKKATILISHSRYQPGTWTHVAATYDGRHMALYVDGTQVASSLDQSGPLNSPFMASCRSLLLGGDSSEDGHYFRGHLGTLVFWSTALPQSHFQHSSQHSSGEEEATDLVLTASFEPVNTEWVPFRDEKYPRLEVLQGFEPEPEILSPLQPPLCGQTVCDNVELISQYNGYWPLRGEKVIRYQVVNICDDEGLNPIVSEEQIRLQHEALNEAFSRYNISWQLSVHQVHNSTLRHRVVLVNCEPSKIGNDHCDPECEHPLTGYDGGDCRLQGRCYSWNRRDGLCHVECNNMLNDFDDGDCCDPQVADVRKTCFDPDSPKRAYMSVKELKEALQLNSTHFLNIYFASSVREDLAGAATWPWDKDAVTHLGGIVLSPAYYGMPGHTDTMIHEVGHVLGLYHVFKGVSERESCNDPCKETVPSMETGDLCADTAPTPKSELCREPEPTSDTCGFTRFPGAPFTNYMSYTDDNCTDNFTPNQVARMHCYLDLVYQQWTESRKPTPIPIPPMVIGQTNKSLTIHWLPPISGVVYDRASGSLCGACTEDGTFRQYVHTASSRRVCDSSGYWTPEEAVGPPDVDQPCEPSLQAWSPEVHLYHMNMTVPCPTEGCSLELLFQHPVQADTLTLWVTSFFMESSQVLFDTEILLENKESVHLGPLDTFCDIPLTIKLHVDGKVSGVKVYTFDERIEIDAALLTSQPHSPLCSGCRPVRYQVLRDPPFASGLPVVVTHSHRKFTDVEVTPGQMYQYQVLAEAGGELGEASPPLNHIHGAPYCGDGKVSERLGEECDDGDLVSGDGCSKVCELEEGFNCVGEPSLCYMYEGDGICEPFERKTSIVDCGIYTPKGYLDQWATRAYSSHEDKKKCPVSLVTGEPHSLICTSYHPDLPNHRPLTGWFPCVASENETQDDRSEQPEGSLKKEDEVWLKVCFNRPGEARAIFIFLTTDGLVPGEHQQPTVTLYLTDVRGSNHSLGTYGLSCQHNPLIINVTHHQNVLFHHTTSVLLNFSSPRVGISAVALRTSSRIGLSAPSNCISEDEGQNHQGQSCIHRPCGKQDSCPSLLLDHADVVNCTSIGPGLMKCAITCQRGFALQASSGQYIRPMQKEILLTCSSGHWDQNVSCLPVDCGVPDPSLVNYANFSCSEGTKFLKRCSISCVPPAKLQGLSPWLTCLEDGLWSLPEVYCKLECDAPPIILNANLLLPHCLQDNHDVGTICKYECKPGYYVAESAEGKVRNKLLKIQCLEGGIWEQGSCIPVVCEPPPPVFEGMYECTNGFSLDSQCVLNCNQEREKLPILCTKEGLWTQEFKLCENLQGECPPPPSELNSVEYKCEQGYGIGAVCSPLCVIPPSDPVMLPENITADTLEHWMEPVKVQSIVCTGRRQWHPDPVLVHCIQSCEPFQADGWCDTINNRAYCHYDGGDCCSSTLSSKKVIPFAADCDLDECTCRDPKAEENQ

SEQ ID NO: 39 - protein, 491 aa, Homo sapiens
MALLWGLLVLSWSCLQGPCSVFSPVSAMEPLGRQLTSGPNQEQVSPLTLLKLGNQEPGGQTALKSPPGVCSRDPTPEQTHRLARAMMAFTADLFSLVAQTSTCPNLILSPLSVALALSHLALGAQNHTLQRLQQVLHAGSGPCLPHLLSRLCQDLGPGAFRLAARMYLQKGFPIKEDFLEQSEQLFGAKPVSLTGKQEDDLANINQWVKEATEGKIQEFLSGLPEDTVLLLLNAIHFQGFWRNKFDPSLTQRDSFHLDEQFTVPVEMMQARTYPLRWFLLEQPEIQVAHFPFKNNMSFVVLVPTHFEWNVSQVLANLSWDTLHPPLVWERPTKVRLPKLYLKHQMDLVATLSQLGLQELFQAPDLRGISEQSLVVSGVQHQSTLELSEVGVEAAAATSIAMSRMSLSSFSVNRPFLFFIFEDTTGLPLFVGSVRNPNPSAPRELKEQQDSPGNKDFLQSLKGFPRGDKLFGPDLKLVPPMEEDYPQFGSPK

SEQ ID NO: 40 - protein, 375 aa, Homo sapiens
MDDDIAALVVDNGSGMCKAGFAGDDAPRAVFPSIVGRPRHQGVMVGMGQKDSYVGDEAQSKRGILTLKYPIEHGIVTNWDDMEKIWHHTFYNELRVAPEEHPVLLTEAPLNPKANREKMTQIMFETFNTPAMYVAIQAVLSLYASGRTTGIVMDSGDGVTHTVPIYEGYALPHAILRLDLAGRDLTDYLMKILTERGYSFTTTAEREIVRDIKEKLCYVALDFEQEMATAASSSSLEKSYELPDGQVITIGNERFRCPEALFQPSFLGMESCGIHETTFNSIMKCDVDIRKDLYANTVLSGGTTMYPGIADRMQKEITALAPSTMKIKIIAPPERKYSVWIGGSILASLSTFQQMWISKQEYDESGPSIVHRKCF

SEQ ID NO: 41 - protein, 599 aa, Homo sapiens
MKLLKLTGFIFFLFFLTESLTLPTQPRDIENFNSTQKFIEDNIEYITIIAFAQYVQEATFEEMEKLVKDMVEYKDRCMADKTLPECSKLPNNVLQEKICAMEGLPQKHNFSHCCSKVDAQRRLCFFYNKKSDVGFLPPFPTLDPEEKCQAYESNRESLLNHFLYEVARRNPFVFAPTLLTVAVHFEEVAKSCCEEQNKVNCLQTRAIPVTQYLKAFSSYQKHVCGALLKFGTKVVHFIYIAILSQKFPKIEFKELISLVEDVSSNYDGCCEGDVVQCIRDTSKVMNHICSKQDSISSKIKECCEKKIPERGQCIINSNKDDRPKDLSLREGKFTDSENVCQERDADPDTFFAKFTFEYSRRHPDLSIPELLRIVQIYKDLLRNCCNTENPPGCYRYAEDKFNETTEKSLKMVQQECKHFQNLGKDGLKYHYLIRLTKIAPQLSTEELVSLGEKMVTAFTTCCTLSEEFACVDNLADLVFGELCGVNENRTINPAVDHCCKTNFAFRRPCFESLKADKTYVPPPFSQDLFTFHADMCQSQNEELQRKTDRFLVNLVKLKHELTDEELQSLFTNFANVVDKCCKAESPEVCFNEESPKIGN

SEQ ID NO: 42 - protein, 464 aa, Homo sapiens
MYSNVIGTVTSGKRKVYLLSLLLIGFWDCVTCHGSPVDICTAKPRDIPMNPMCIYRSPEKKATEDEGSEQKIPEATNRRVWELSKANSRFATTFYQHLADSKNDNDNIFLSPLSISTAFAMTKLGACNDTLQQLMEVFKFDTISEKTSDQIHFFFAKLNCRLYRKANKSSKLVSANRLFGDKSLTFNETYQDISELVYGAKLQPLDFKENAEQSRAAINKWVSNKTEGRITDVIPSEAINELTVLVLVNTIYFKGLWKSKFSPENTRKELFYKADGESCSASMMYQEGKFRYRRVAEGTQVLELPFKGDDITMVLILPKPEKSLAKVEKELTPEVLQEWLDELEEMMLVVHMPRFRIEDGFSLKEQLQDMGLVDLFSPEKSKLPGIVAEGRDDLYVSDAFHKAFLEVNEEGSEAAASTAVVIAGRSLNPNRVTFKANRPFLVFIREVPLNTIIFMGRVANPCVK

SEQ ID NO: 43 - protein, 100 aa, Homo sapiens
MKLLAATVLLLTICSLEGALVRRQAKEPCVESLVSQYFQTVTDYGKDLMEKVKSPELQAEAKSYFEKSKEQLTPLIKKAGTELVNFLSYFVELGTQPATQ

SEQ ID NO: 44 - protein, 1429 aa, Homo sapiens
MVAAAAATEARLRRRTAATAALAGRSGGPHWDWDVTRAGRPGLGAGLRLPRLLSPPLRPRLLLLLLLLSPPLLLLLLPCEAEAAAAAAAVSGSAAAEAKECDRPCVNGGRCNPGTGQCVCPAGWVGEQCQHCGGRFRLTGSSGFVTDGPGNYKYKTKCTWLIEGQPNRIMRLRFNHFATECSWDHLYVYDGDSIYAPLVAAFSGLIVPERDGNETVPEVVATSGYALLHFFSDAAYNLTGFNITYSFDMCPNNCSGRGECKISNSSDTVECECSENWKGEACDIPHCTDNCGFPHRGICNSSDVRGCSCFSDWQGPGCSVPVPANQSFWTREEYSNLKLPRASHKAVVNGNIMWVVGGYMFNHSDYNMVLAYDLASREWLPLNRSVNNVVVRYGHSLALYKDKIYMYGGKIDSTGNVTNELRVFHIHNESWVLLTPKAKEQYAVVGHSAHIVTLKNGRVVMLVIFGHCPLYGYISNVQEYDLDKNTWSILHTQGALVQGGYGHSSVYDHRTRALYVHGGYKAFSANKYRLADDLYRYDVDTQMWTILKDSRFFRYLHTAVIVSGTMLVFGGNTHNDTSMSHGAKCFSSDFMAYDIACDRWSVLPRPDLHHDVNRFGHSAVLHNSTMYVFGGFNSLLLSDILVFTSEQCDAHRSEAACLAAGPGIRCVWNTGSSQCISWALATDEQEEKLKSECFSKRTLDHDRCDQHTDCYSCTANTNDCHWCNDHCVPRNHSCSEGQISIFRYENCPKDNPMYYCNKKTSCRSCALDQNCQWEPRNQECIALPENICGIGWHLVGNSCLKITTAKENYDNAKLFCRNHNALLASLTTQKKVEFVLKQLRIMQSSQSMSKLTLTPWVGLRKINVSYWCWEDMSPFTNSLLQWMPSEPSDAGFCGILSEPSTRGLKAATCINPLNGSVCERPANHSAKQCRTPCALRTACGDCTSGSSECMWCSNMKQCVDSNAYVASFPFGQCMEWYTMSTCPPENCSGYCTCSHCLEQPGCGWCTDPSNTGKGKCIEGSYKGPVKMPSQAPTGNFYPQPLLNSSMCLEDSRYNWSFIHCPACQCNGHSKCINQSICEKCENLTTGKHCETCISGFYGDPTNGGKCQPCKCNGHASLCNTNTGKCFCTTKGVKGDECQLCEVENRYQGNPLRGTCYYTLLIDYQFTFSLSQEDDRYYTAINFVATPDEQNRDLDMFINASKNFNLNITWAASFSAGTQAGEEMPVVSKTNIKEYKDSFSNEKFDFRNHPNITFFVYVSNFTWPIKIQIAFSQHSNFMDLVQFFVTFFSCFLSLLLVAAVVWKIKQSCWASRRREQLLREMQQMASRPFASVNVALETDEEPPDLIGGSIKTVPKPIALEPCFGNKAAVLSVFVRLPRGLGGIPPPGQSGLAVASALVDISQQMPIVYKEKSGAVRNRKQQPPAQPGTCI

SEQ ID NO: 45 - protein, 119 aa, Homo sapiens
MSRSVALAVLALLSLSGLEAIQRTPKIQVYSRHPAENGKSNFLNCYVSGFHPSDIEVDLLKNGERIEKVEHSDLSFSKDWSFYLLYYTEFTPTEKDEYACRVNHVTLSQPKIVKWDRDM

SEQ ID NO: 46 - protein, 683 aa, Homo sapiens
MALFVRLLALALALALGPAATLAGPAKSPYQLVLQHSRLRGRQHGPNVCAVQKVIGTNRKYFTNCKQWYQRKICGKSTVISYECCPGYEKVPGEKGCPAALPLSNLYETLGVVGSTTTQLYTDRTEKLRPEMEGPGSFTIFAPSNEAWASLPAEVLDSLVSNVNIELLNALRYHMVGRRVLTDELKHGMTLTSMYQNSNIQIHHYPNGIVTVNCARLLKADHHATNGVVHLIDKVISTITNNIQQIIEIEDTFETLRAAVAASGLNTMLEGNGQYTLLAPTNEAFEKIPSETLNRILGDPEALRDLLNNHILKSAMCAEAIVAGLSVETLEGTTLEVGCSGDMLTINGKAIISNKDILATNGVIHYIDELLIPDSAKTLFELAAESDVSTAIDLFRQAGLGNHLSGSERLTLLAPLNSVFKDGTPPIDAHTRNLLRNHIIKDQLASKYLYHGQTLETLGGKKLRVFVYRNSLCIENSCIAAHDKRGRYGTLFTMDRVLTPPMGTVMDVLKGDNRFSMLVAAIQSAGLTETLNREGVYTVFAPTNEAFRALPPRERSRLLGDAKELANILKYHIGDEILVSGGIGALVRLKSLQGDKLEVSLKNNVVSVNKEPVAEPDIMATNGVVHVITNVLQPPANRPQERGDELADSALEIFKQASAFSRASQRSVRLAPVYQKLLERMKH

SEQ ID NO: 47 - protein, 597 aa, Homo sapiens
MHPPKTPSGALHRKRKMAAWPFSRLWKVSDPILFQMTLIAALLPAVLGNCGPPPTLSFAAPMDITLTETRFKTGTTLKYTCLPGYVRSHSTQTLTCNSDGEWVYNTFCIYKRCRHPGELRNGQVEIKTDLSFGSQIEFSCSEGFFLIGSTTSRCEVQDRGVGWSHPLPQCEIVKCKPPPDIRNGRHSGEENFYAYGFSVTYSCDPRFSLLGHASISCTVENETIGVWRPSPPTCEKITCRKPDVSHGEMVSGFGPIYNYKDTIVFKCQKGFVLRGSSVIHCDADSKWNPSPPACEPNSCINLPDIPHASWETYPRPTKEDVYVVGTVLRYRCHPGYKPTTDEPTTVICQKNLRWTPYQGCEALCCPEPKLNNGEITQHRKSRPANHCVYFYGDEISFSCHETSRFSAICQGDGTWSPRTPSCGDICNFPPKIAHGHYKQSSSYSFFKEEIIYECDKGYILVGQAKLSCSYSHWSAPAPQCKALCRKPELVNGRLSVDKDQYVEPENVTIQCDSGYGVVGPQSITCSGNRTWYPEVPKCEWETPEGCEQVLTGKRLMQCLPNPEDVKMALEVYKLSLEIEQLELQRDSARQSTLDKEL

SEQ ID NO: 48 - protein, 423 aa, Homo sapiens
MKLCSLAVLVPIVLFCEQHVFAFQSGQVLAALPRTSRQVQVLQNLTTTYEIVLWQPVTADLIVKKKQVHFFVNASDVDNVKAHLNVSGIPCSVLLADVEDLIQQQISNDTVSPRASASYYEQYHSLNEIYSWIEFITERHPDMLTKIHIGSSFEKYPLYVLKVSGKEQAAKNAIWIDCGIHAREWISPAFCLWFIGHITQFYGIIGQYTNLLRLVDFYVMPVVNVDGYDYSWKKNRMWRKNRSFYANNHCIGTDLNRNFASKHWCEEGASSSSCSETYCGLYPESEPEVKAVASFLRRNINQIKAYISMHSYSQHIVFPYSYTRSKSKDHEELSLVASEAVRAIEKTSKNTRYTHGHGSETLYLAPGGGDDWIYDLGIKYSFTIELRDTGTYGFLLPERYIKPTCREAFAAVSKIAWHVIRNV

SEQ ID NO: 49 - protein, 253 aa, Homo sapiens
MHSWERLAVLVLLGAAACAAPPRGRILGGREAEAHARPYMASVQLNGAHLCGGVLVAEQWVLSAAHCLEDAADGKVQVLLGAHSLSQPEPSKRLYDVLRAVPHPDSQPDTIDHDLLLLQLSEKATLGPAVRPLPWQRVDRDVAPGTLCDVAGWGIVNHAGRRPDSLQHVLLPVLDRATCNRRTHHDGAITERLMCAESNRRDSCKGDSGGPLVCGGVLEGVVTSGSRVCGNRKKPGIYTRVASYAAWIDSVLA

SEQ ID NO: 50 - protein, 661 aa, Homo sapiens
MAPSADPGMSRMLPFLLLLWFLPITEGSQRAEPMFTAVTNSVLPPDYDSNPTQLNYGVAVTDVDHDGDFEIVVAGYNGPNLVLKYDRAQKRLVNIAVDERSSPYYALRDRQGNAIGVTACDIDGDGREEIYFLNTNNAFSGVATYTDKLFKFRNNRWEDILSDEVNVARGVASLFAGRSVACVDRKGSGRYSIYIANYAYGNVGPDALIEMDPEASDLSRGILALRDVAAEAGVSKYTGGRGVSVGPILSSSASDIFCDNENGPNFLFHNRGDGTFVDAAASAGVDDPHQHGRGVALADFNRDGKVDIVYGNWNGPHRLYLQMSTHGKVRFRDIASPKFSMPSPVRTVITADFDNDQELEIFFNNIAYRSSSANRLFRVIRREHGDPLIEELNPGDALEPEGRGTGGVVTDFDGDGMLDLILSHGESMAQPLSVFRGNQGFNNNWLRVVPRTRFGAFARGAKVVLYTKKSGAHLRIIDGGSGYLCEMEPVAHFGLGKDEASSVEVTWPDGKMVSRNVASGEMNSVLEILYPRDEDTLQDPAPLECGQGFSQQENGHCMDTNECIQFPFVCPRDKPVCVNTYGSYRCRTNKKCSRGYEPNEDGTACVGTLGQSPGPRPTTPTAAAATAAAAAAAGAATAAPVLVDGDLNLGSVVKESCEPSC

SEQ ID NO: 51 - protein, 617 aa, Homo sapiens
MPALSRWASLPGPSMREAAFMYSTAVAIFLVILVAALQGSAPRESPLPYHIPLDPEGSLELSWNVSYTQEAIHFQLLVRRLKAGVLFGMSDRGELENADLVVLWTDGDTAYFADAWSDQKGQIHLDPQQDYQLLQVQRTPEGLTLLFKRPFGTCDPKDYLIEDGTVHLVYGILEEPFRSLEAINGSGLQMGLQRVQLLKPNIPEPELPSDACTMEVQAPNIQIPSQETTYWCYIKELPKGFSRHHIIKYEPIVTKGNEALVHHMEVFQCAPEMDSVPHFSGPCDSKMKPDRLNYCRHVLAAWALGAKAFYYPEEAGLAFGGPGSSRYLRLEVHYHNPLVIEGRNDSSGIRLYYTAKLRRFNAGIMELGLVYTPVMAIPPRETAFILTGYCTDKCTQLALPPSGIHIFASQLHTHLTGRKVVTVLVRDGREWEIVNQDNHYSPHFQEIRMLKKVVSVHPGDVLITSCTYNTEDRELATVGGFGILEEMCVNYVHYYPQTQLELCKSAVDAGFLQKYFHLINRFNNEDVCTCPQASVSQQFTSVPWNSFNRDVLKALYSFAPISMHCNKSSAVRFQGEWNLQPLPKVISTLEEPTPQCPTSQGRSPAGPTVVSIGGGKG

SEQ ID NO: 52 - protein, 661 aa, Homo sapiens
MRLKNLTFIIILIISGELYAEEKPCGFPHVENGRIAQYYYTFKSFYFPMSIDKKLSFFCLAGYTTESGRQEEQTTCTTEGWSPEPRCFKKCTKPDLSNGYISDVKLLYKIQENMRYGCASGYKTTGGKDEEVVQCLSDGWSSQPTCRKEHETCLAPELYNGNYSTTQKTFKVKDKVQYECATGYYTAGGKKTEEVECLTYGWSLTPKCTKLKCSSLRLIENGYFHPVKQTYEEGDVVQFFCHENYYLSGSDLIQCYNFGWYPESPVCEGRRNRCPPPPLPINSKIQTHSTTYRHGEIVHIECELNFEIHGSAEIRCEDGKWTEPPKCIEGQEKVACEEPPFIENGAANLHSKIYYNGDKVTYACKSGYLLHGSNEITCNRGKWTLPPECVENNENCKHPPVVMNGAVADGILASYATGSSVEYRCNEYYLLRGSKISRCEQGKWSSPPVCLEPCTVNVDYMNRNNIEMKWKYEGKVLHGDLIDFVCKQGYDLSPLTPLSELSVQCNRGEVKYPLCTRKESKGMCTSPPLIKHGVIISSTVDTYENGSSVEYRCFDHHFLEGSREAYCLDGMWTTPPLCLEPCTLSFTEMEKNNLLLKWDFDNRPHILHGEYIEFICRGDTYPAELYITGSILRMQCDRGQLKYPRCIPRQSTLSYQEPLRT

SEQ ID NO: 53 - protein, 866 aa, Homo sapiens
MFSMRIVCLVLSVVGTAWTADSGEGDFLAEGGGVRGPRVVERHQSACKDSDWPFCSDEDWNYKCPSGCRMKGLIDEVNQDFTNRINKLKNSLFEYQKNNKDSHSLTTNIMEILRGDFSSANNRDNTYNRVSEDLRSRIEVLKRKVIEKVQHIQLLQKNVRAQLVDMKRLEVDIDIKIRSCRGSCSRALAREVDLKDYEDQQKQLEQVIAKDLLPSRDRQHLPLIKMKPVPDLVPGNFKSQLQKVPPEWKALTDMPQMRMELERPGGNEITRGGSTSYGTGSETESPRNPSSAGSWNSGSSGPGSTGNRNPGSSGTGGTATWKPGSSGPGSTGSWNSGSSGTGSTGNQNPGSPRPGSTGTWNPGSSERGSAGHWTSESSVSGSTGQWHSESGSFRPDSPGSGNARPNNPDWGTFEEVSGNVSPGTRREYHTEKLVTSKGDKELRTGKEKVTSGSTTTTRRSCSKTVTKTVIGPDGHKEVTKEVVTSEDGSDCPEAMDLGTLSGIGTLDGFRHRHPDEAAFFDTASTGKTFPGFFSPMLGEFVSETESRGSESGIFTNTKESSSHHPGIAEFPSRGKSSSYSKQFTSSTSYNRGDSTFESKSYKMADEAGSEADHEGTHSTKRGHAKSRPVRDCDDVLQTHPSGTQSGIFNIKLPGSSKIFSVYCDQETSLGGWLLIQQRMDGSLNFNRTWQDYKRGFGSLNDEGEGEFWLGNDYLHLLTQRGSVLRVELEDWAGNEAYAEYHFRVGSEAEGYALQVSSYEGTAGDALIEGSVEEGAEYTSHNNMQFSTFDRDADQWEENCAEVYGGGWWYNNCQAANLNGIYYPGGSYDPRNNSPYEIENGVVWVSFRGADYSLRAVRMKIRPLVTQ

SEQ ID NO: 54 - protein, 201 aa, Homo sapiens
MTEKAPEPHVEEDDDDELDSKLNYKPPPQKSLKELQEMDKDDESLIKYKKTLLGDGPVVTDPKAPNVVVTRLTLVCESAPGPITMDLTGDLEALKKETIVLKEGSEYRVKIHFKVNRDIVSGLKYVQHTYRTGVKVDKATFMVGSYGPRPEEYEFLTPVEEAPKGMLARGTYHNKSFFTDDDKQDHLSWEWNLSIKKEWTE

SEQ ID NO: 55 - protein, 626 aa, Homo sapiens
MPLLLLLLLLPSPLHPHPICEVSKVASHLEVNCDKRNLTALPPDLPKDTTILHLSENLLYTFSLATLMPYTRLTQLNLDRCELTKLQVDGTLPVLGTLDLSHNQLQSLPLLGQTLPALTVLDVSFNRLTSLPLGALRGLGELQELYLKGNELKTLPPGLLTPTPKLEKLSLANNNLTELPAGLLNGLENLDTLLLQENSLYTIPKGFFGSHLLPFAFLHGNPWLCNCEILYFRRWLQDNAENVYVWKQGVDVKAMTSNVASVQCDNSDKFPVYKYPGKGCPTLGDEGDTDLYDYYPEEDTEGDKVRATRTVVKFPTKAHTTPWGLFYSWSTASLDSQMPSSLHPTQESTKEQTTFPPRWTPNFTLHMESITFSKTPKSTTEPTPSPTTSEPVPEPAPNMTTLEPTPSPTTPEPTSEPAPSPTTPEPTPIPTIATSPTILVSATSLITPKSTFLTTTKPVSLLESTKKTIPELDQPPKLRGVLQGHLESSRNDPFLHPDFCCLLPLGFYVLGLFWLLFASVVLILLLSWVGHVKPQALDSGQGAALTTATQTTHLELQRGRQVTVPRAWLLFLRGSLPTFRSSLFLWVRPNGRVGPLVAGRRPSALSQGRGQDLLSTVSIRYSGHSL

SEQ ID NO: 56 - protein, 348 aa, Homo sapiens
MSDLGAVISLLLWGRQLFALYSGNDVTDISDDRFPKPPEIANGYVEHLFRYQCKNYYRLRTEGDGVYTLNDKKQWINKAVGDKLPECEAVCGKPKNPANPVQRILGGHLDAKGSFPWQAKMVSHHNLTTGATLINEQWLLTTAKNLFLNHSENATAKDIAPTLTLYVGKKQLVEIEKVVLHPNYHQVDIGLIKLKQKVLVNERVMPICLPSKNYAEVGRVGYVSGWGQSDNFKLTDHLKYVMLPVADQYDCITHYEGSTCPKWKAPKSPVGVQPILNEHTFCVGMSKYQEDTCYGDAGSAFAVHDLEEDTWYAAGILSFDKSCAVAEYGVYVKVTSIQDWVQKTIAEN

SEQ ID NO: 57 - protein, 128 aa, Homo sapiens
MSLRLDTTPSCNSARPLHALQVLLLLSLLLTALASSTKGQTKRNLAKGKEESLDSDLYAELRCMCIKTTSGIHPKNIQSLEVIGKGTHCNQVEVIATLKDGRKICLDPDAPRIKKIVQKKLAGDESAD

SEQ ID NO: 58 - protein, 451 aa, Homo sapiens
MREIVHIQIGQCGNQIGAKFWEMIGEEHGIDLAGSDRGASALQLERISVYYNEAYGRKYVPRAVLVDLEPGTMDSIRSSKLGALFQPDSFVHGNSGAGNNWAKGHYTEGAELIENVLEVVRHESESCDCLQGFQIVHSLGGGTGSGMGTLLMNKIREEYPDRIMNSFSVMPSPKVSDTVVEPYNAVLSIHQLIENADACFCIDNEALYDICFRTLKLTTPTYGDLNHLVSLTMSGITTSLRFPGQLNADLRKLAVNMVPFPRLHFFMPGFAPLTAQGSQQYRALSVAELTQQMFDARNTMAACDLRRGRYLTVACIFRGKMSTKEVDQQLLSVQTRNSSCFVEWIPNNVKVAVCDIPPRGLSMAATFIGNNTAIQEIFNRVSEHFSAMFKRKAFVHWYTSEGMDINEFGEAENNIHDLVSEYQQFQDAKAVLEEDEEVTEEAEMEPEDKGH

SEQ ID NO: 59 - protein, 44 aa, Homo sapiens
MSDKPDMAEIEKFDKSKLKKTETQEKNPLPSKETIEQEKQAGES

SEQ ID NO: 60 - protein, 739 aa, Homo sapiens
MPGKMVVILGASNILWIMFAASQAFKIETTPESRYLAQIGDSVSLTCSTTGCESPFFSWRTQIDSPLNGKVTNEGTTSTLTMNPVSFGNEHSYLCTATCESRKLEKGIQVEIYSFPKDPEIHLSGPLEAGKPITVKCSVADVYPFDRLEIDLLKGDHLMKSQEFLEDADRKSLETKSLEVTFTPVIEDIGKVLVCRAKLHIDEMDSVPTVRQAVKELQVYISPKNTVISVNPSTKLQEGGSVTMTCSSEGLPAPEIFWSKKLDNGNLQHLSGNATLTLIAMRMEDSGIYVCEGVNLIGKNRKEVELIVQEKPFTVEISPGPRIAAQIGDSVMLTCSVMGCESPSFSWRTQIDSPLSGKVRSEGTNSTLTLSPVSFENEHSYLCTVTCGHKKLEKGIQVELYSFPRDPEIEMSGGLVNGSSVTVSCKVPSVYPLDRLEIELLKGETILENIEFLEDTDMKSLENKSLEMTFIPTIEDTGKALVCQAKLHIDDMEFEPKQRQSTQTLYVNVAPRDTTVLVSPSSILEEGSSVNMTCLSQGFPAPKILWSRQLPNGELQPLSENATLTLISTKMEDSGVYLCEGINQAGRSRKEVELIIQVTPKDIKLTAFPSESVKEGDTVIISCTCGNVPETWIILKKKAETGDTVLKSIDGAYTIRKAQLKDAGVYECESKNKVGSQLRSLTLDVQGRENNKDYFSPELLVLYFASSLIIPAIGMIIYFARKANMKGSYSLVEAQKSKV

SEQ ID NO: 61 - protein, 295 aa, Homo sapiens
MVPVLLSLLLLLGPAVPQENQDGRYSLTYIYTGLSKHVEDVPAFQALGSLNDLQFFRYNSKDRKSQPMGLWRQVEGMEDWKQDSQLQKAREDIFMETLKDIVEYYNDSNGSHVLQGRFGCEIENNRSSGAFWKYYYDGKDYIEFNKEIPAWVPFDPAAQITKQKWEAEPVYVQRAKAYLEEECPATLRKYLKYSKNILDRQDPPSVVVTSHQAPGEKKKLKCLAYDFYPGKIDVHWTRAGEVQEPELRGDVLHNGNGTYQSWVVVAVPPQDTAPYSCHVQHSSLAQPLVVPWEAS

SEQ ID NO: 62 - protein, 1474 aa, Homo sapiens
MGKNKLLHPSLVLLLLVLLPTDASVSGKPQYMVLVPSLLHTETTEKGCVLLSYLNETVTVSASLESVRGNRSLFTDLEAENDVLHCVAFAVPKSSSNEEVMFLTVQVKGPTQEFKKRTTVMVKNEDSLVFVQTDKSIYKPGQTVKFRVVSMDENFHPLNELIPLVYIQDPKGNRIAQWQSFQLEGGLKQFSFPLSSEPFQGSYKVVVQKKSGGRTEHPFTVEEFVLPKFEVQVTVPKIITILEEEMNVSVCGLYTYGKPVPGHVTVSICRKYSDASDCHGEDSQAFCEKFSGQLNSHGCFYQQVKTKVFQLKRKEYEMKLHTEAQIQEEGTVVELTGRQSSEITRTITKLSFVKVDSHFRQGIPFFGQVRLVDGKGVPIPNKVIFIRGNEANYYSNATTDEHGLVQFSINTTNVMGTSLTVRVNYKDRSPCYGYQWVSEEHEEAHHTAYLVFSPSKSFVHLEPMSHELPCGHTQTVQAHYILNGGTLLGLKKLSFYYLIMAKGGIVRTGTHGLLVKQEDMKGHFSISIPVKSDIAPVARLLIYAVLPTGDVIGDSAKYDVENCLANKVDLSFSPSQSLPASHAHLRVTAAPQSVCALRAVDQSVLLMKPDAELSASSVYNLLPEKDLTGFPGPLNDQDDEDCINRHNVYINGITYTPVSSTNEKDMYSFLEDMGLKAFTNSKIRKPKMCPQLQQYEMHGPEGLRVGFYESDVMGRGHARLVHVEEPHTETVRKYFPETWIWDLVVVNSAGVAEVGVTVPDTITEWKAGAFCLSEDAGLGISSTASLRAFQPFFVELTMPYSVIRGEAFTLKATVLNYLPKCIRVSVQLEASPAFLAVPVEKEQAPHCICANGRQTVSWAVTPKSLGNVNFTVSAEALESQELCGTEVPSVPEHGRKDTVIKPLLVEPEGLEKETTFNSLLCPSGGEVSEELSLKLPPNVVEESARASVSVLGDILGSAMQNTQNLLQMPYGCGEQNMVLFAPNIYVLDYLNETQQLTPEVKSKAIGYLNTGYQRQLNYKHYDGSYSTFGERYGRNQGNTWLTAFVLKTFAQARAYIFIDEAHITQALIWLSQRQKDNGCFRSSGSLLNNAIKGGVEDEVTLSAYITIALLEIPLTVTHPVVRNALFCLESAWKTAQEGDHGSHVYTKALLAYAFALAGNQDKRKEVLKSLNEEAVKKDNSVHWERPQKPKAPVGHFYEPQAPSAEVEMTSYVLLAYLTAQPAPTSEDLTSATNIVKWITKQQNAQGGFSSTQDTVVALHALSKYGAATFTRTGKAAQVTIQSSGTFSSKFQVDNNNRLLLQQVSLPELPGEYSMKVTGEGCVYLQTSLKYNILPEKEEFPFALGVQTLPQTCDEPKAHTSFQISLSVSYTGSRSASNMAIVDVKMVSGFIPLKPTVKMLERSNHVSRTEVSSNHVLIYLDKVSNQTLSLFFTVLQDVPVRDLKPAIVKVYDYYETDEFAIAEYNAPCSKDLGNA

SEQ ID NO: 63 - protein, 1628 aa, Homo sapiens
MRLWSWVLHLGLLSAALGCGLAERPRRARRDPRAGRPPRPAAGPATCATRAARGRRASPPPPPPPGGAWEAVRVPRRRQQREARGATEEPSPPSRALYFSGRGEQLRVLRADLELPRDAFTLQVWLRAEGGQRSPAVITGLYDKCSYISRDRGWVVGIHTISDQDNKDPRYFFSLKTDRARQVTTINAHRSYLPGQWVYLAATYDGQFMKLYVNGAQVATSGEQVGGIFSPLTQKCKVLMLGGSALNHNYRGYIEHFSLWKVARTQREILSDMETHGAHTALPQLLLQENWDNVKHAWSPMKDGSSPKVEFSNAHGFLLDTSLEPPLCGQTLCDNTEVIASYNQLSSFRQPKVVRYRVVNLYEDDHKNPTVTREQVDFQHHQLAEAFKQYNISWELDVLEVSNSSLRRRLILANCDISKIGDENCDPECNHTLTGHDGGDCRHLRHPAFVKKQHNGVCDMDCNYERFNFDGGECCDPEITNVTQTCFDPDSPHRAYLDVNELKNILKLDGSTHLNIFFAKSSEEELAGVATWPWDKEALMHLGGIVLNPSFYGMPGHTHTMIHEIGHSLGLYHVFRGISEIQSCSDPCMETEPSFETGDLCNDTNPAPKHKSCGDPGPGNDTCGFHSFFNTPYNNFMSYADDDCTDSFTPNQVARMHCYLDLVYQGWQPSRKPAPVALAPQVLGHTTDSVTLEWFPPIDGHFFERELGSACHLCLEGRILVQYASNASSPMPCSPSGHWSPREAEGHPDVEQPCKSSVRTWSPNSAVNPHTVPPACPEPQGCYLELEFLYPLVPESLTIWVTFVSTDWDSSGAVNDIKLLAVSGKNISLGPQNVFCDVPLTIRLWDVGEEVYGIQIYTLDEHLEIDAAMLTSTADTPLCLQCKPLKYKVVRDPPLQMDVASILHLNRKFVDMDLNLGSVYQYWVITISGTEESEPSPAVTYIHGRGYCGDGIIQKDQGEQCDDMNKINGDGCSLFCRQEVSFNCIDEPSRCYFHDGDGVCEEFEQKTSIKDCGVYTPQGFLDQWASNASVSHQDQQCPGWVIIGQPAASQVCRTKVIDLSEGISQHAWYPCTISYPYSQLAQTTFWLRAYFSQPMVAAAVIVHLVTDGTYYGDQKQETISVQLLDTKDQSHDLGLHVLSCRNNPLIIPVVHDLSQPFYHSQAVRVSFSSPLVAISGVALRSFDNFDPVTLSSCQRGETYSPAEQSCVHFACEKTDCPELAVENASLNCSSSDRYHGAQCTVSCRTGYVLQIRRDDELIKSQTGPSVTVTCTEGKWNKQVACEPVDCSIPDHHQVYAASFSCPEGTTFGSQCSFQCRHPAQLKGNNSLLTCMEDGLWSFPEALCELMCLAPPPVPNADLQTARCRENKHKVGSFCKYKCKPGYHVPGSSRKSKKRAFKTQCTQDGSWQEGACVPVTCDPPPPKFHGLYQCTNGFQFNSECRIKCEDSDASQGLGSNVIHCRKDGTWNGSFHVCQEMQGQCSVPNELNSNLKLQCPDGYAIGSECATSCLDHNSESIILPMNVTVRDIPHWLNPTRVERVVCTAGLKWYPHPALIHCVKGCEPFMGDNYCDAINNRAFCNYDGGDCCTSTVKTKKVTPFPMSCDLQGDCACRDPQAQEHSRKDLRGYSHG

SEQ ID NO: 64 - protein, 224 aa, Homo sapiens
MEKLLCFLVLTSLSHAFGQTDMSRKAFVFPKESDTSYVSLKAPLTKPLKAFTVCLHFYTELSSTRGYSIFSYATKRQDNEILIFWSKDIGYSFTVGGSEILFEVPEVTVAPVHICTSWESASGIVEFWVDGKPRVRKSLKKGYTVGAEASIILGQEQDSFGGNFEGSQSLVGDIGNVNMWDFVLSPDEINTIYLGGPFSPNVLNWRALKYEVQGEVFTKPQLWP

SEQ ID NO: 65 - protein, 223 aa, Homo sapiens
MNKPLLWISVLTSLLEAFAHTDLSGKVFVFPRESVTDHVNLITPLEKPLQNFTLCFRAYSDLSRAYSLFSYNTQGRDNELLVYKERVGEYSLYIGRHKVTSKVIEKFPAPVHICVSWESSSGIAEFWINGTPLVKKGLRQGYFVEAQPKIVLGQEQDSYGGKFDRSQSFVGEIGDLYMWDSVLPPENILSAYQGTPLPANILDWQALNYEIRGYVIIKPLVWV

SEQ ID NO: 66 - protein, 763 aa, Homo sapiens
MNQKTILVLLILAVITIFALVCVLLVGRGGDGGEPSQLPHCPSVSPSAQPWTHPGQSQLFADLSREELTAVMRFLTQRLGPGLVDAAQARPSDNCVFSVELQLPPKAAALAHLDRGSPPPAREALAIVFFGRQPQPNVSELVVGPLPHPSYMRDVTVERHGGPLPYHRRPVLFQEYLDIDQMIFNRELPQASGLLHHCCFYKHRGRNLVTMTTAPRGLQSGDRATWFGLYYNISGAGFFLHHVGLELLVNHKALDPARWTIQKVFYQGRYYDSLAQLEAQFEAGLVNVVLIPDNGTGGSWSLKSPVPPGPAPPLQFYPQGPRFSVQGSRVASSLWTFSFGLGAFSGPRIFDVRFQGERLVYEISLQEALAIYGGNSPAAMTTRYVDGGFGMGKYTTPLTRGVDCPYLATYVDWHFLLESQAPKTIRDAFCVFEQNQGLPLRRHHSDLYSHYFGGLAETVLVVRSMSTLLNYDYVWDTVFHPSGAIEIRFYATGYISSAFLFGATGKYGNQVSEHTLGTVHTHSAHFKVDLDVAGLENWVWAEDMVFVPMAVPWSPEHQLQRLQVTRKLLEMEEQAAFLVGSATPRYLYLASNHSNKWGHPRGYRIQMLSFAGEPLPQNSSMARGFSWERYQLAVTQRKEEEPSSSSVFNQNDPWAPTVDFSDFINNETIAGKDLVAWVTAGFLHIPHAEDIPNTVTVGNGVGFFLRPYNFFDEDPSFYSADSIYFRGDQDAGACEVNPLACLPQAAACAPDLPAFSHGGFSHN

SEQ ID NO: 67 - protein, 569 aa, Homo sapiens
MLLLFSVILISWVSTVGGEGTLCDFPKIHHGFLYDEEDYNPFSQVPTGEVFYYSCEYNFVSPSKSFWTRITCTEEGWSPTPKCLRMCSFPFVKNGHSESSGLIHLEGDTVQIICNTGYSLQNNEKNISCVERGWSTPPICSFTKGECHVPILEANVDAQPKKESYKVGDVLKFSCRKNLIRVGSDSVQCYQFGWSPNFPTCKGQVRSCGPPPQLSNGEVKEIRKEEYGHNEVVEYDCNPNFIINGPKKIQCVDGEWTTLPTCVEQVKTCGYIPELEYGYVQPSVPPYQHGVSVEVNCRNEYAMIGNNMITCINGIWTELPMCVATHQLKRCKIAGVNIKTLLKLSGKEFNHNSRIRYRCSDIFRYRHSVCINGKWNPEVDCTEKREQFCPPPPQIPNAQNMTTTVNYQDGEKVAVLCKENYLLPEAKEIVCKDGRWQSLPRCVESTAYCGPPPSINNGDTTSFPLSVYPPGSTVTYRCQSFYKLQGSVTVTCRNKQWSEPPRCLDPCVVSEENMNKNNIQLKWRNDGKLYAKTGDAVEFQCKFPHKAMISSPPFRAICQEGKFEYPICE

SEQ ID NO: 68 - protein, 5183 aa, Homo sapiens
MGNEASLEGEGLPEGLAAAAAAGGGASGAGSPSHTAIPAGMEADLSQLSEEERRQIAAVMSRAQGLPKGSVPPAAAESPSMHRKQELDSSHPPKQSGRPPDPGRPAQPGLSKSRTTDTFRSEQKLPGRSPSTISLKESKSRTDLKEEHKSSMMPGFLSEVNALSAVSSVVNKFNPFDLISDSEASQEETTKKQKVVQKEQGKPEGIIKPPLQQQPPKPIPKQQGPGRDPLQQDGTPKSISSQQPEKIKSQPPGTGKPIQGPTQTPQTDHAKLPLQRDASRPQTKQADIVRGESVKPSLPSPSKPPIQQPTPGKPPAQQPGHEKSQPGPAKPPAQPSGLTKPLAQQPGTVKPPVQPPGTTKPPAQPLGPAKPPAQQTGSEKPSSEQPGPKALAQPPGVGKTPAQQPGPAKPPTQQVGTPKPLAQQPGLQSPAKAPGPTKTPAQTKPPSQQPGSTKPPPQQPGPAKPSPQQPGSTKPPSQQPGSAKPSAQQPSPAKPSAQQFTKPVSQTGFGKPLQPPTVSPSAKQPPSQGLPKTICPLCNTTELLLHVPEKANFNTCTECQTTVCSLCGFNPNPHLTEAKEWLCLNCQMKRALGGDLAPVPSSPQPKLKTAPVTTTSAVSKSSPQPQQTSPKKDAAPKQDLSKAPEPKKPPPLVKQPTLHGSPSAKAKQPPEADSLSKPAPPKEPSVPSEQDKAPVADDKPKQPKMVKPTTDLVSSSSATTKPDIPSSKVQSQAEEKTTPPLKTDSAKPSQSFPPTGEKVTPFDSKAIPRPASDSKIISHPGPSSESKGQKQVDPVQKKEEPKKAQTKMSPKPDAKPMPKGSPTPPGPRPTAGQTVPTPQQSPKPQEQSRRFSLNLGSITDAPKSQPTTPQETVTGKLFGFGASIFSQASNLISTAGQPGPHSQSGPGAPMKQAPAPSQPPTSQGPPKSTGQAPPAPAKSIPVKKETKAPAAEKLEPKAEQAPTVKRTETEKKPPPIKDSKSLTAEPQKAVLPTKLEKSPKPESTCPLCKTELNIGSKDPPNFNTCTECKNQVCNLCGFNPTPHLTENCQTQRAISGQLGDIRKMPPAPSGPKASPMPVPTESSSQKTAVPPQVKLVKKQEQEVKTEAEKVILEKVKETLSMEKIPPMVTTDQKQEESKLEKDKASALQEKKPLPEEKKLIPEEEKIRSEEKKPLLEEKKPTPEDKKLLPEAKTSAPEEQKHDLLKSQVQIAEEKLEGRVAPKTVQEGKQPQTKMEGLPSGTPQSLPKEDDKTTKTIKEQPQPPCTAKPDQEKEDDKSDTSSSQQPKSPQGLSDTGYSSDGISSSLGEIPSLIPTDEKDILKGLKKDSFSQESSPSSPSDLAKLESTVLSILEAQASTLADEKSEKKTQPHEVSPEQPKDQEKTQSLSETLEITISEEEIKESQEERKDTFKKDSQQDIPSSKDHKEKSEFVDDITTRREPYDSVEESSESENSPVPQRKRRTSVGSSSSDEYKQEDSQGSGEEEDFIRKQIIEMSADEDASGSEDDEFIRNQLKEISSSTESQKKEETKGKGKITAGKHRRLTRKSSTSIDEDAGRRHSWHDEDDEAFDESPELKYRETKSQESEELVVTGGGGLRRFKTIELNSTIADKYSAESSQKKTSLYFDEEPELEMESLTDSPEDRSRGEGSSSLHASSFTPGTSPTSVSSLDEDSDSSPSHKKGESKQQRKARHRPHGPLLPTIEDSSEEEELREEEELLKEQEKQREIEQQQRKSSSKKSKKDKDELRAQRRRERPKTPPSNLSPIEDASPTEELRQAAEMEELHRSSCSEYSPSIESDPEGFEISPEKIIEVQKVYKLPTAVSLYSPTDEQSIMQKEGSQKALKSAEEMYEEMMHKTHKYKAFPAANERDEVFEKEPLYGGMLIEDYIYESLVEDTYNGSVDGSLLTRQEEENGFMQQKGREQKIRLSEQIYEDPMQKITDLQKEFYELESLHSVVPQEDIVSSSFIIPESHEIVDLGTMVTSTEEERKLLDADAAYEELMKRQQMQLTPGSSPTQAPIGEDMTESTMDFDRMPDASLTSSVLSGASLTDSTSSATLSIPDVKITQHFSTEEIEDEYVTDYTREIQEIIAHESLILTYSEPSESATSVPPSDTPSLTSSVSSVCTTDSSSPITTLDSITTVYTEPVDMITKFEDSEEISSSTYFPGSIIDYPEEISVSLDRTAPPDGRASADHIVISLSDMASSIIESVVPKPEGPVADTVSTDLLISEKDPVKKAKKETGNGIILEVLEAYRDKKELEAERTKSSLSETVFDHPPSSVIALPMKEQLSTTYFTSGETFGQEKPASQLPSGSPSVSSLPAKPRPFFRSSSLDISAQPPPPPPPPPPPPPPPPPPPPPPLPPPTSPKPTILPKKKLTVASPVTTATPLFDAVTTLETTAVLRSNGLPVTRICTTAPPPVPPKPSSIPSGLVFTHRPEPSKPPIAPKPVIPQLPTTTQKPTDIHPKPTGLSLTSSMTLNLVTSADYKLPSPTSPLSPHSNKSSPRFSKSLTETYVVITLPSEPGTPTDSSASQAITSWPLGSPSKDLVSVEPVFSVVPPVTAVEIPISSEQTFYISGALQTFSATPVTAPSSFQAAPTSVTQFLTTEVSKTEVSATRSTAPSVGLSSISITIPPEPLALDNIHLEKPQYKEDGKLQLVGDVIDLRTVPKVEVKTTDKCIDLSASTMDVKRQITANEVYGKQISAVQPSIINLSVTSSIVTPVSLATETVTFVTCTASASYTTGTESLVGAEHAMTTPLQLTTSKHAEPPYRIPSDQVFPIAREEAPINLSLGTPAHAVTLAITKPVTVPPVGVTNGWTDSTVSQGITDGEVVDLSTTKSHRTVVTMDESTSSVMTKIIEDEKPVDLTAGRRAVCCDVVYKLPFGRSCTAQQPATTLPEDRFGYRDDHYQYDRSGPYGYRGIGGMKPSMSDTNLAEAGHFFYKSKNAFDYSEGTDTAVDLTSGRVTTGEVMDYSSKTTGPYPETRQVISGAGISTPQYSTARMTPPPGPQYCVGSVLRSSNGVVYSSVATPTPSTFAITTQPGSIFSTTVRDLSGIHTADAVTSLPAMHHSQPMPRSYFITTGASETDIAVTGIDISASLQTITMESLTAETIDSVPTLTTASEVFPEVVGDESALLIVPEEDKQQQQLDLERELLELEKIKQQRFAEELEWERQEIQRFREQEKIMVQKKLEELQSMKQHLLFQQEEERQAQFMMRQETLAQQQLQLEQIQQLQQQLHQQLEEQKIRQIYQYNYDPSGTASPQTTTEQAILEGQYAALEGSQFWATEDATTTASAVVAIEIPQSQGWYTVQSDGVTQYIAPPGILSTVSEIPLTDVVVKEEKQPKKRSSGAKVRGQYDDMGENMTDDPRSFKKIVDSGVQTDDEDATDRSYVSRRRRTKKSVDTSVQTDDEDQDEWDMPTRSRRKARVGKYGDSMTEADKTKPLSKVSSIAVQTVAEISVQTEPVGTIRTPSIRARVDAKVEIIKHISAPEKTYKGGSLGCQTEADSDTQSPQYLSATSPPKDKKRPTPLEIGYSSHLRADSTVQLAPSPPKSPKVLYSPISPLSPGKALESAFVPYEKPLPDDISPQKVLHPDMAKVPPASPKTAKMMQRSMSDPKPLSPTADESSRAPFQYTEGYTTKGSQTMTSSGAQKKVKRTLPNPPPEEISTGTQSTFSTMGTVSRRRICRTNTMARAKILQDIDRELDLVERESAKLRKKQAELDEEEKEIDAKLRYLEMGINRRKEALLKEREKRERAYLQGVAEDRDYMSDSEVSSTRPTRIESQHGIERPRTAPQTEFSQFIPPQTQTESQLVPPTSPYTQYQYSSPALPTQAPTSYTQQSHFEQQTLYHQQVSPYQTQPTFQAVATMSFTPQVQPTPTPQPSYQLPSQMMVIQQKPRQTTLYLEPKITSNYEVIRNQPLMIAPVSTDNTFAVSHLGSKYNSLDLRIGLEERSSMASSPISSISADSFYADIDHHTPRNYVLIDDIGEITKGTAALSTAFSLHEKDLSKTDRLLRTTETRRSQEVTDFLAPLQSSSRLHSYVKAEEDPMEDPYELKLLKHQIKQEFRRGTESLDHLAGLSHYYHADTSYRHFPKSEKYSISRLTLEKQAAKQLPAAILYQKQSKHKKSLIDPKMSKFSPIQESRDLEPDYSSYMTSSTSSIGGISSRARLLQDDITFGLRKNITDQQKFMGSSLGTGLGTLGNTIRSALQDEADKPYSSGSRSRPSSRPSSVYGLDLSIKRDSSSSSLRLKAQEAEALDVSFSHASSSARTKPTSLPISQSRGRIPIVAQNSEEESPLSPVGQPMGMARAAAGPLPPISADTRDQFGSSHSLPEVQQHMREESRTRGYDRDIAFIMDDFQHAMSDSEAYHLRREETDWFDKPRESRLENGHGLDRKLPERLVHSRPLSQHQEQIIQMNGKTMHYIFPHARIKITRDSKDHTVSMQVLEWNGIPLTSKTYEEVQSIISQQSGEAEICVRLDLNMLSDSENSQHLELHEPPKAVDKAKSPGVDPKQLAAELQKVSLQQSPLVLSSVVEKGSHVHSGPTSAGSSSVPSPGQPGSPSVSKKKHGSSKLQINYDLGNLIIHILQARNLVPRDNNGYSDPFVKVYLLPGRGAEYKRRTKHVQKSLNPEWNQTVIYKSISMEQLKKKTLEVTVWDYDRFSSNDFLGEVLIDLSSTSHLDNTPRWYPLKEQTESIDHGKSHSSQSSQQSPKPSVIKSRSHGIFPDPSKDMQVPTIEKSHSSPGSSKSSSEGHLRSHGPSRSQSKTSVTQTHLEDAGAAIAAAEAAVQQLRIQPTAHKSGQSNHARKQHRHSIAGVLPIQRTQSDNLPPPANGNQDQSQLALRKVMSDGPVKPEGAKPPNHRPAESSVSTGSSGSSFGSGYSVDSEGSSSTAGETNLFPIPRIGKMGQNGQEPVKQPGVGVGLADTEARGQREPKPGQACFLGARNMKEIQPMPEIYPETDKDGEKYPGSLFLPFSNLCQCLIKTNWKPVDGEAQADLELLPNLQTRRILPPSMYLLQKTKALQTYKRSDIRGSNGPTINATTCFETTSVMGEIKIALKKEMKTDGEQLIVEILQCRNITYKFKSPDHLPDLYVKIYVMNISTQKKVIKKKTRVCRHDREPSFNETFRFSLSPAGHSLQILLFSNGGKFMKKTLIGEACIWLDKVDLRKRIVNWHKLLVSPTQTH

SEQ ID NO: 69 - protein, 493 aa, Homo sapiens
MAAATGPSFWLGNETLKVPLALFALNRQRLCERLRKNPAVQAGSIVVLQGGEETQRYCTDTGVLFRQESFFHWAFGVTEPGCYGVIDVDTGKSTLFVPRLPASHATWMGKIHSKEHFKEKYAVDDVQYVDEIASVLTSQKPSVLLTLRGVNTDSGSVCREASFDGISKFEVNNTILHPEIVECRVFKTDMELEVLRYTNKISSEAHREVMKAVKVGMKEYELESLFEHYCYSRGGMRHSSYTCICGSGENSAVLHYGHAGAPNDRTIQNGDMCLFDMGGEYYCFASDITCSFPANGKFTADQKAVYEAVLRSSRAVMGAMKPGVWWPDMHRLADRIHLEELAHMGILSGSVDAMVQAHLGAVFMPHGLGHFLGIDVHDVGGYPEGVERIDEPGLRSLRTARHLQPGMVLTVEPGIYFIDHLLDEALADPARASFLNREVLQRFRGFGGVRIEEDVVVTDSGIELLTCVPRTVEEIEACMAGCDKAFTPFSGPK

SEQ ID NO: 70 - protein, 3926 aa, Homo sapiens
MGNEVSLEGGAGDGPLPPGGAGPGPGPGPGPGAGKPPSAPAGGGQLPAAGAARSTAVPPVPGPGPGPGPGPGPGSTSRRLDPKEPLGNQRAASPTPKQASATTPGHESPRETRAQGPAGQEADGPRRTLQVDSRTQRSGRSPSVSPDRGSTPTSPYSVPQIAPLPSSTLCPICKTSDLTSTPSQPNFNTCTQCHNKVCNQCGFNPNPHLTQVKEWLCLNCQMQRALGMDMTTAPRSKSQQQLHSPALSPAHSPAKQPLGKPDQERSRGPGGPQPGSRQAETARATSVPGPAQAAAPPEVGRVSPQPPQPTKPSTAEPRPPAGEAPAKSATAVPAGLGATEQTQEGLTGKLFGLGASLLTQASTLMSVQPEADTQGQPAPSKGTPKIVFNDASKEAGPKPLGSGPGPGPAPGAKTEPGARMGPGSGPGALPKTGGTTSPKHGRAEHQAASKAAAKPKTMPKERAICPLCQAELNVGSKSPANYNTCTTCRLQVCNLCGFNPTPHLVEKTEWLCLNCQTKRLLEGSLGEPTPLPPPTSQQPPVGAPHRASGTSPLKQKGPQGLGQPSGPLPAKASPLSTKASPLPSKASPQAKPLRASEPSKTPSSVQEKKTRVPTKAEPMPKPPPETTPTPATPKVKSGVRRAEPATPVVKAVPEAPKGGEAEDLVGKPYSQDASRSPQSLSDTGYSSDGISSSQSEITGVVQQEVEQLDSAGVTGPHPPSPSEIHKVGSSMRPLLQAQGLAPSERSKPLSSGTGEEQKQRPHSLSITPEAFDSDEELEDILEEDEDSAEWRRRREQQDTAESSDDFGSQLRHDYVEDSSEGGLSPLPPQPPARAAELTDEDFMRRQILEMSAEEDNLEEDDTATSGRGLAKHGTQKGGPRPRPEPSQEPAALPKRRLPHNATTGYEELLPEGGSAEATDGSGTLQGGLRRFKTIELNSTGSYGHELDLGQGPDPSLDREPELEMESLTGSPEDRSRGEHSSTLPASTPSYTSGTSPTSLSSLEEDSDSSPSRRQRLEEAKQQRKARHRSHGPLLPTIEDSSEEEELREEEELLREQEKMREVEQQRIRSTARKTRRDKEELRAQRRRERSKTPPSNLSPIEDASPTEELRQAAEMEELHRSSCSEYSPSPSLDSEAEALDGGPSRLYKSGSEYNLPTFMSLYSPTETPSGSSTTPSSGRPLKSAEEAYEEMMRKAELLQRQQGQAAGARGPHGGPSQPTGPRGLGSFEYQDTTDREYGQAAQPAAEGTPASLGAAVYEEILQTSQSIVRMRQASSRDLAFAEDKKKEKQFLNAESAYMDPMKQNGGPLTPGTSPTQLAAPVSFSTPTSSDSSGGRVIPDVRVTQHFAKETQDPLKLHSSPASPSSASKEIGMPFSQGPGTPATTAVAPCPAGLPRGYMTPASPAGSERSPSPSSTAHSYGHSPTTANYGSQTEDLPQAPSGLAAAGRAAREKPLSASDGEGGTPQPSRAYSYFASSSPPLSPSSPSESPTFSPGKMGPRATAEFSTQTPSPAPASDMPRSPGAPTPSPMVAQGTQTPHRPSTPRLVWQESSQEAPFMVITLASDASSQTRMVHASASTSPLCSPTETQPTTHGYSQTTPPSVSQLPPEPPGPPGFPRVPSAGADGPLALYGWGALPAENISLCRISSVPGTSRVEPGPRTPGTAVVDLRTAVKPTPIILTDQGMDLTSLAVEARKYGLALDPIPGRQSTAVQPLVINLNAQEHTFLATATTVSITMASSVFMAQQKQPVVYGDPYQSRLDFGQGGGSPVCLAQVKQVEQAVQTAPYRSGPRGRPREAKFARYNLPNQVAPLARRDVLITQMGTAQSIGLKPGPVPEPGAEPHRATPAELRSHALPGARKPHTVVVQMGEGTAGTVTTLLPEEPAGALDLTGMRPESQLACCDMVYKLPFGSSCTGTFHPAPSVPEKSMADAAPPGQSSSPFYGPRDPEPPEPPTYRAQGVVGPGPHEEQRPYPQGLPGRLYSSMSDTNLAEAGLNYHAQRIGQLFQGPGRDSAMDLSSLKHSYSLGFADGRYLGQGLQYGSVTDLRHPTDLLAHPLPMRRYSSVSNIYSDHRYGPRGDAVGFQEASLAQYSATTAREISRMCAALNSMDQYGGRHGSGGGGPDLVQYQPQHGPGLSAPQSLVPLRPGLLGNPTFPEGHPSPGNLAQYGPAAGQGTAVRQLLPSTATVRAADGMIYSTINTPIAATLPITTQPASVLRPMVRGGMYRPYASGGITAVPLTSLTRVPMIAPRVPLGPTGLYRYPAPSRFPIASSVPPAEGPVYLGKPAAAKAPGAGGPSRPEMPVGAAREEPLPTTTPAAIKEAAGAPAPAPLAGQKPPADAAPGGGSGALSRPGFEKEEASQEERQRKQQEQLLQLERERVELEKLRQLRLQEELERERVELQRHREEEQLLVQRELQELQTIKHHVLQQQQEERQAQFALQREQLAQQRLQLEQIQQLQQQLQQQLEEQKQRQKAPFPAACEAPGRGPPLAAAELAQNGQYWPPLTHAAFIAMAGPEGLGQPREPVLHRGLPSSASDMSLQTEEQWEASRSGIKKRHSMPRLRDACELESGTEPCVVRRIADSSVQTDDEDGESRYLLSRRRRARRSADCSVQTDDEDSAEWEQPVRRRRSRLPRHSDSGSDSKHDATASSSSAAATVRAMSSVGIQTISDCSVQTEPDQLPRVSPAIHITAATDPKVEIVRYISAPEKTGRGESLACQTEPDGQAQGVAGPQLVGPTAISPYLPGIQIVTPGPLGRFEKKKPDPLEIGYQAHLPPESLSQLVSRQPPKSPQVLYSPVSPLSPHRLLDTSFASSERLNKAHVSPQKHFTADSALRQQTLPRPMKTLQRSLSDPKPLSPTAEESAKERFSLYQHQGGLGSQVSALPPNSLVRKVKRTLPSPPPEEAHLPLAGQASPQLYAASLLQRGLTGPTTVPATKASLLRELDRDLRLVEHESTKLRKKQAELDEEEKEIDAKLKYLELGITQRKESLAKDRGGRDYPPLRGLGEHRDYLSDSELNQLRLQGCTTPAGQFVDFPATAAAPATPSGPTAFQQPRFQPPAPQYSAGSGGPTQNGFPAHQAPTYPGPSTYPAPAFPPGASYPAEPGLPNQQAFRPTGHYAGQTPMPTTQSTLFPVPADSRAPLQKPRQTSLADLEQKVPTNYEVIASPVVPMSSAPSETSYSGPAVSSGYEQGKVPEVPRAGDRGSVSQSPAPTYPSDSHYTSLEQNVPRNYVMIDDISELTKDSTSTAPDSQRLEPLGPGSSGRPGKEPGEPGVLDGPTLPCCYARGEEESEEDSYDPRGKGGHLRSMESNGRPASTHYYGDSDYRHGARVEKYGPGPMGPKHPSKSLAPAAISSKRSKHRKQGMEQKISKFSPIEEAKDVESDLASYPPPAVSSSLVSRGRKFQDEITYGLKKNVYEQQKYYGMSSRDAVEDDRIYGGSSRSRAPSAYSGEKLSSHDFSGWGKGYEREREAVERLQKAGPKPSSLSMAHSRVRPPMRSQASEEESPVSPLGRPRPAGGPLPPGGDTCPQFCSSHSMPDVQEHVKDGPRAHAYKREEGYILDDSHCVVSDSEAYHLGQEETDWFDKPRDARSDRFRHHGGHAVSSSSQKRGPARHSYHDYDEPPEEGLWPHDEGGPGRHASAKEHRHGDHGRHSGRHTGEEPGRRAAKPHARDLGRHEARPHSQPSSAPAMPKKGQPGYPSSAEYSQPSRASSAYHHASDSKKGSRQAHSGPAALQSKAEPQAQPQLQGRQAAPGPQQSQSPSSRQIPSGAASRQPQTQQQQQGLGLQPPQQALTQARLQQQSQPTTRGSAPAASQPAGKPQPGPSTATGPQPAGPPRAEQTNGSKGTAKAPQQGRAPQAQPTPGPGPAGVKAGARPGGTPGAPAGQPGADGESVFSKILPGGAAEQAGKLTEAVSAFGKKFSSFW

SEQ ID NO: 71 - protein, 895 aa, Homo sapiens
MRMSVGLSLLLPLWGRTFLLLLSVVMAQSHWPSEPSEAVRDWENQLEASMHSVLSDLHEAVPTVVGIPDGTAVVGRSFRVTIPTDLIASSGDIIKVSAAGKEALPSWLHWDSQSHTLEGLPLDTDKGVHYISVSATRLGANGSHIPQTSSVFSIEVYPEDHSDLQSVRTASPDPGEVVSSACAADEPVTVLTVILDADLTKMTPKQRIDLLHRMRSFSEVELHNMKLVPVVNNRLFDMSAFMAGPGNPKKVVENGALLSWKLGCSLNQNSVPDIHGVEAPAREGAMSAQLGYPVVGWHIANKKPPLPKRVRRQIHATPTPVTAIGPPTTAIQEPPSRIVPTPTSPAIAPPTETMAPPVRDPVPGKPTVTIRTRGAIIQTPTLGPIQPTRVSEAGTTVPGQIRPTMTIPGYVEPTAVATPPTTTTKKPRVSTPKPATPSTDSTTTTTRRPTKKPRTPRPVPRVTTKVSITRLETASPPTRIRTTTSGVPRGGEPNQRPELKNHIDRVDAWVGTYFEVKIPSDTFYDHEDTTTDKLKLTLKLREQQLVGEKSWVQFNSNSQLMYGLPDSSHVGKHEYFMHATDKGGLSAVDAFEIHVHRRPQGDRAPARFKAKFVGDPALVLNDIHKKIALVKKLAFAFGDRNCSTITLQNITRGSIVVEWTNNTLPLEPCPKEQIAGLSRRIAEDDGKPRPAFSNALEPDFKATSITVTGSGSCRHLQFIPVVPPRRVPSEAPPTEVPDRDPEKSSEDDVYLHTVIPAVVVAAILLIAGIIAMICYRKKRKGKLTLEDQATFIKKGVPIIFADELDDSKPPPSSSMPLILQEEKAPLPPPEYPNQSVPETTPLNQDTMGEYTPLRDEDPNAPPYQPPPPFTVPMEGKGSRPKNMTPYRSPPPYVPP

SEQ ID NO: 72 - protein, 527 aa, Homo sapiens
MADSRDPASDQMQHWKEQRAAQKADVLTTGAGNPVGDKLNVITVGPRGPLLVQDVVFTDEMAHFDRERIPERVVHAKGAGAFGYFEVTHDITKYSKAKVFEHIGKKTPIAVRFSTVAGESGSADTVRDPRGFAVKFYTEDGNWDLVGNNTPIFFIRDPILFPSFIHSQKRNPQTHLKDPDMVWDFWSLRPESLHQVSFLFSDRGIPDGHRHMNGYGSHTFKLVNANGEAVYCKFHYKTDQGIKNLSVEDAARLSQEDPDYGIRDLFNAIATGKYPSWTFYIQVMTFNQAETFPFNPFDLTKVWPHKDYPLIPVGKLVLNRNPVNYFAEVEQIAFDPSNMPPGIEASPDKMLQGRLFAYPDTHRHRLGPNYLHIPVNCPYRARVANYQRDGPMCMQDNQGGAPNYYPNSFGAPEQQPSALEHSIQYSGEVRRFNTANDDNVTQVRAFYVNVLNEEQRKRLCENIAGHLKDAQIFIQKKAVKNFTEVHPDYGSHIQALLDKYNAEKPKNAIHTFVQSGSHLAAREKANL

SEQ ID NO: 73 - protein, 261 aa, Homo sapiens
MASPDWGYDDKNGPEQWSKLYPIANGNNQSPVDIKTSETKHDTSLKPISVSYNPATAKEIINVGHSFHVNFEDNDNRSVLKGGPFSDSYRLFQFHFHWGSTNEHGSEHTVDGVKYSAELHVAHWNSAKYSSLAEAASKADGLAVIGVLMKVGEANPKLQKVLDALQAIKTKGKRAPFTNFDPSTLLPSSLDFWTYPGSLTHPPLYESVTWIICKESISVSSEQLAQFRSLLSNVEGDNAVPMQHNNRPTQPLKGRTVRASF

SEQ ID NO: 74 - protein, 532 aa, Homo sapiens
MAPSSPRPALPALLVLLGALFPGPGNAQTSVSPSKVILPRGGSVLVTCSTSCDQPKLLGIETPLPKKELLLPGNNRKVYELSNVQEDSQPMCYSNCPDGQSTAKTFLTVYWTPERVELAPLPSWQPVGKNLTLRCQVEGGAPRANLTVVLLRGEKELKREPAVGEPAEVTTTVLVRRDHHGANFSCRTELDLRPQGLELFENTSAPYQLQTFVLPATPPQLVSPRVLEVDTQGTVVCSLDGLFPVSEAQVHLALGDQRLNPTVTYGNDSFSAKASVSVTAEDEGTQRLTCAVILGNQSQETLQTVTIYSFPAPNVILTKPEVSEGTEVTVKCEAHPRAKVTLNGVPAQPLGPRAQLLLKATPEDNGRSFSCSATLEVAGQLIHKNQTRELRVLYGPRLDERDCPGNWTWPENSQQTPMCQAWGNPLPELKCLKDGTFPLPIGESVTVTRDLEGTYLCRARSTQGEVTRKVTVNVLSPRYEIVIITVVAAAVIMGTAGLSTYLYNRQRKIKKYRLQQAQKGTPMKPNTQATPP

SEQ ID NO: 75 - protein, 698 aa, Homo sapiens
MRLAVGALLVCAVLGLCLAVPDKTVRWCAVSEHEATKCQSFRDHMKSVIPSDGPSVACVKKASYLDCIRAIAANEADAVTLDAGLVYDAYLAPNNLKPVVAEFYGSKEDPQTFYYAVAVVKKDSGFQMNQLRGKKSCHTGLGRSAGWNIPIGLLYCDLPEPRKPLEKAVANFFSGSCAPCADGTDFPQLCQLCPGCGCSTLNQYFGYSGAFKCLKDGAGDVAFVKHSTIFENLANKADRDQYELLCLDNTRKPVDEYKDCHLAQVPSHTVVARSMGGKEDLIWELLNQAQEHFGKDKSKEFQLFSSPHGKDLLFKDSAHGFLKVPPRMDAKMYLGYEYVTAIRNLREGTCPEAPTDECKPVKWCALSHHERLKCDEWSVNSVGKIECVSAETTEDCIAKIMNGEADAMSLDGGFVYIAGKCGLVPVLAENYNKSDNCEDTPEAGYFAVAVVKKSASDLTWDNLKGKKSCHTAVGRTAGWNIPMGLLYNKINHCRFDEFFSEGCAPGSKKDSSLCKLCMGSGLNLCEPNNKEGYYGYTGAFRCLVEKGDVAFVKHQTVPQNTGGKNPDPWAKNLNEKDYELLCLDGTRKPVEEYANCHLARAPNHAVVTRKDKEACVHKILRQQQHLFGSNVTDCSGNFCLFRSETKDLLFRDDTVCLAKLHDRNTYEKYLGEEYVKAVGNLRKCSTSSLLEACTFRRP

SEQ ID NO: 76 - protein, 585 aa, Homo sapiens
MTPPRLFWVWLLVAGTQGVNDGDMRLADGGATNQGRVEIFYRGQWGTVCDNLWDLTDASVVCRALGFENATQALGRAAFGQGSGPIMLDEVQCTGTEASLADCKSLGWLKSNCRHERDAGVVCTNETRSTHTLDLSRELSEALGQIFDSQRGCDLSISVNVQGEDALGFCGHTVILTANLEAQALWKEPGSNVTMSVDAECVPMVRDLLRYFYSRRIDITLSSVKCFHKLASAYGARQLQGYCASLFAILLPQDPSFQMPLDLYAYAVATGDALLEKLCLQFLAWNFEALTQAEAWPSVPTDLLQLLLPRSDLAVPSELALLKAVDTWSWGERASHEEVEGLVEKIRFPMMLPEELFELQFNLSLYWSHEALFQKKTLQALEFHTVPFQLLARYKGLNLTEDTYKPRIYTSPTWSAFVTDSSWSARKSQLVYQSRRGPLVKYSSDYFQAPSDYRYYPYQSFQTPQHPSFLFQDKRVSWSLVYLPTIQSCWNYGFSCSSDELPVLGLTKSGGSDRTIAYENKALMLCEGLFVADVTDFEGWKAAIPSALDTNSSKSTSSFPCPAGHFNGFRTVIRPFYLTNSSGVD

SEQ ID NO: 77 - protein, 198 aa, Homo sapiens
MASGNARIGKPAPDFKATAVVDGAFKEVKLSDYKGKYVVLFFYPLDFTFVCPTEIIAFSNRAEDFRKLGCEVLGVSVDSQFTHLAWINTPRKEGGLGPLNIPLLADVTRRLSEDYGVLKTDEGIAYRGLFIIDGKGVLRQITVNDLPVGRSVDEALRLVQAFQYTDEHGEVCPAGWKPGSDTIKPNVDDSKEYFSKHN

SEQ ID NO: 78 - protein, 259 aa, Homo sapiens
MSKYKLIMLRHGEGAWNKENRFCSWVDQKLNSEGMEEARNCGKQLKALNFEFDLVFTSVLNRSIHTAWLILEELGQEWVPVESSWRLNERHYGALIGLNREQMALNHGEEQVRLWRRSYNVTPPPIEESHPYYQEIYNDRRYKVCDVPLDQLPRSESLKDVLERLLPYWNERIAPEVLRGKTILISAHGNSSRALLKHLEGISDEDIINITLPTGVPILLELDENLRAVGPHQFLGDQEAIQAAIKKVEDQGKVKQAKK

SEQ ID NO: 79 - protein, 405 aa, Homo sapiens
MPLLLYTCLLWLPTSGLWTVQAMDPNAAYVNMSNHHRGLASANVDFAFSLYKHLVALSPKKNIFISPVSISMALAMLSLGTCGHTRAQLLQGLGFNLTERSETEIHQGFQHLHQLFAKSDTSLEMTMGNALFLDGSLELLESFSADIKHYYESEVLAMNFQDWATASRQINSYVKNKTQGKIVDLFSGLDSPAILVLVNYIFFKGTWTQPFDLASTREENFYVDETTVVKVPMMLQSSTISYLHDSELPCQLVQMNYVGNGTVFFILPDKGKMNTVIAALSRDTINRWSAGLTSSQVDLYIPKVTISGVYDLGDVLEEMGIADLFTNQANFSRITQDAQLKSSKVVHKAVLQLNEEGVDTAGSTGVTLNLTSKPIILRFNQPFIIMIFDHFTWSSLFLARVMNPV

SEQ ID NO: 80 - protein, 260 aa, Homo sapiens
MSHHWGYGKHNGPEHWHKDFPIAKGERQSPVDIDTHTAKYDPSLKPLSVSYDQATSLRILNNGHAFNVEFDDSQDKAVLKGGPLDGTYRLIQFHFHWGSLDGQGSEHTVDKKKYAAELHLVHWNTKYGDFGKAVQQPDGLAVLGIFLKVGSAKPGLQKVVDVLDSIKTKGKSADFTNFDPRGLLPESLDYWTYPGSLTTPPLLECVTWIVLKEPISVSSEQVLKFRKLNFNGEGEPEELMVDNWRPAQPLKNRQIKASFK

SEQ ID NO: 81 - protein, 2843 aa, Homo sapiens
MAAASYDQLLKQVEALKMENSNLRQELEDNSNHLTKLETEASNMKEVLKQLQGSIEDEAMASSGQIDLLERLKELNLDSSNFPGVKLRSKMSLRSYGSREGSVSSRSGECSPVPMGSFPRRGFVNGSRESTGYLEELEKERSLLLADLDKEEKEKDWYYAQLQNLTKRIDSLPLTENFSLQTDMTRRQLEYEARQIRVAMEEQLGTCQDMEKRAQRRIARIQQIEKDILRIRQLLQSQATEAERSSQNKHETGSHDAERQNEGQGVGEINMATSGNGQGSTTRMDHETASVLSSSSTHSAPRRLTSHLGTKVEMVYSLLSMLGTHDKDDMSRTLLAMSSSQDSCISMRQSGCLPLLIQLLHGNDKDSVLLGNSRGSKEARARASAALHNIIHSQPDDKRGRREIRVLHLLEQIRAYCETCWEWQEAHEPGMDQDKNPMPAPVEHQICPAVCVLMKLSFDEEHRHAMNELGGLQAIAELLQVDCEMYGLTNDHYSITLRRYAGMALTNLTFGDVANKATLCSMKGCMRALVAQLKSESEDLQQVIASVLRNLSWRADVNSKKTLREVGSVKALMECALEVKKESTLKSVLSALWNLSAHCTENKADICAVDGALAFLVGTLTYRSQTNTLAIIESGGGILRNVSSLIATNEDHRQILRENNCLQTLLQHLKSHSLTIVSNACGTLWNLSARNPKDQEALWDMGAVSMLKNLIHSKHKMIAMGSAAALRNLMANRPAKYKDANIMSPGSSLPSLHVRKQKALEAELDAQHLSETFDNIDNLSPKASHRSKQRHKQSLYGDYVFDTNRHDDNRSDNFNTGNMTVLSPYLNTTVLPSSSSSRGSLDSSRSEKDRSLERERGIGLGNYHPATENPGTSSKRGLQISTTAAQIAKVMEEVSAIHTSQEDRSSGSTTELHCVTDERNALRRSSAAHTHSNTYNFTKSENSNRTCSMPYAKLEYKRSSNDSLNSVSSSDGYGKRGQMKPSIESYSEDDESKFCSYGQYPADLAHKIHSANHMDDNDGELDTPINYSLKYSDEQLNSGRQSPSQNERWARPKHIIEDEIKQSEQRQSRNQSTTYPVYTESTDDKHLKFQPHFGQQECVSPYRSRGANGSETNRVGSNHGINQNVSQSLCQEDDYEDDKPTNYSERYSEEEQHEEEERPTNYSIKYNEEKRHVDQPIDYSLKYATDIPSSQKQSFSFSKSSSGQSSKTEHMSSSSENTSTPSSNAKRQNQLHPSSAQSRSGQPQKAATCKVSSINQETIQTYCVEDTPICFSRCSSLSSLSSAEDEIGCNQTTQEADSANTLQIAEIKEKIGTRSAEDPVSEVPAVSQHPRTKSSRLQGSSLSSESARHKAVEFSSGAKSPSKSGAQTPKSPPEHYVQETPLMFSRCTSVSSLDSFESRSIASSVQSEPCSGMVSGIISPSDLPDSPGQTMPPSRSKTPPPPPQTAQTKREVPKNKAPTAEKRESGPKQAAVNAAVQRVQVLPDADTLLHFATESTPDGFSCSSSLSALSLDEPFIQKDVELRIMPPVQENDNGNETESEQPKESNENQEKEAEKTIDSEKDLLDDSDDDDIEILEECIISAMPTKSSRKAKKPAQTASKLPPPVARKPSQLPVYKLLPSQNRLQPQKHVSFTPGDDMPRVYCVEGTPINFSTATSLSDLTIESPPNELAAGEGVRGGAQSGEFEKRDTIPTEGRSTDEAQGGKTSSVTIPELDDNKAEEGDILAECINSAMPKGKSHKPFRVKKIMDQVQQASASSSAPNKNQLDGKKKKPTSPVKPIPQNTEYRTRVRKNADSKNNLNAERVFSDNKDSKKQNLKNNSKVFNDKLPNNEDRVRGSFAFDSPHHYTPIEGTPYCFSRNDSLSSLDFDDDDVDLSREKAELRKAKENKESEAKVTSHTELTSNQQSANKTQAIAKQPINRGQPKPILQKQSTFPQSSKDIPDRGAATDEKLQNFAIENTPVCFSHNSSLSSLSDIDQENNNKENEPIKETEPPDSQGEPSKPQASGYAPKSFHVEDTPVCFSRNSSLSSLSIDSEDDLLQECISSAMPKKKKPSRLKGDNEKHSPRNMGGILGEDLTLDLKDIQRPDSEHGLSPDSENFDWKAIQEGANSIVSSLHQAAAAACLSRQASSDSDSILSLKSGISLGSPFHLTPDQEEKPFTSNKGPRILKPGEKSTLETKKIESESKGIKGGKKVYKSLITGKVRSNSEISGQMKQPLQANMPSISRGRTMIHIPGVRNSSSSTSPVSKKGPPLKTPASKSPSEGQTATTSPRGAKPSVKSELSPVARQTSQIGGSSKAPSRSGSRDSTPSRPAQQPLSRPIQSPGRNSISPGRNGISPPNKLSQLPRTSSPSTASTKSSGSGKMSYTSPGRQMSQQNLTKQTGLSKNASSIPRSESASKGLNQMNNGNGANKKVELSRMSSTKSSGSESDRSERPVLVRQSTFIKEAPSPTLRRKLEESASFESLSPSSRPASPTRSQAQTPVLSPSLPDMSLSTHSSVQAGGWRKLPPNLSPTIEYNDGRPAKRHDIARSHSESPSRLPINRSGTWKREHSKHSSSLPRVSTWRRTGSSSSILSASSESSEKAKSEDEKHVNSISGTKQSKENQVSAKGTWRKIKENEFSPTNSTSQTVSSGATNGAESKTLIYQMAPAVSKTEDVWVRIEDCPINNPRSGRSPTGNTPPVIDSVSEKANPNIKDSKDNQAKQNVGNGSVPMRTVGLENRLNSFIQVDAPDQKGTEIKPGQNNPVPVSETNESSIVERTPFSSSSSSKHSSPSGTVAARVTPFNYNPSPRKSSADSTSARPSQIPTPVNNNTKKRDSKTDSTESSGTQSPKRHSGSYLVTSV

SEQ ID NO: 82 - protein, 1394 aa, Homo sapiens
MDTKLMCLLFFFSLPPLLVSNHTGRIKVVFTPSICKVTCTKGSCQNSCEKGNTTTLISENGHAADTLTATNFRVVICHLPCMNGGQCSSRDKCQCPPNFTGKLCQIPVHGASVPKLYQHSQQPGKALGTHVIHSTHTLPLTVTSQQGVKVKFPPNIVNIHVKHPPEASVQIHQVSRIDGPTGQKTKEAQPGQSQVSYQGLPVQKTQTIHSTYSHQQVIPHVYPVAAKTQLGRCFQETIGSQCGKALPGLSKQEDCCGTVGTSWGFNKCQKCPKKPSYHGYNQMMECLPGYKRVNNTFCQDINECQLQGVCPNGECLNTMGSYRCTCKIGFGPDPTFSSCVPDPPVISEEKGPCYRLVSSGRQCMYPLSVHLTKQLCCCSVGKAGPHCEKCPLPGTAAFKEICPGGMGYTVSGVHRRRPIHHHVGKGPVFVKPKNTQPVAKSTHPPPLPAKEEPVEALTFSREHGARSAEPEVATAPPEKEIPSLDQEKTKLEPGQPQLSPGISAIHLHPQFPVVIEKTSPPVPVEVAPEASTSSASQVIAPTQVTEINECTVNPDICGAGHCINLPVRYTCICYEGYRFSEQQRKCVDIDECTQVQHLCSQGRCENTEGSFLCICPAGFMASEEGTNCIDVDECLRPDVCGEGHCVNTVGAFRCEYCDSGYRMTQRGRCEDIDECLNPSTCPDEQCVNSPGSYQCVPCTEGFRGWNGQCLDVDECLEPNVCANGDCSNLEGSYMCSCHKGYTRTPDHKHCRDIDECQQGNLCVNGQCKNTEGSFRCTCGQGYQLSAAKDQCEDIDECQHRHLCAHGQCRNTEGSFQCVCDQGYRASGLGDHCEDINECLEDKSVCQRGDCINTAGSYDCTCPDGFQLDDNKTCQDINECEHPGLCGPQGECLNTEGSFHCVCQQGFSISADGRTCEDIDECVNNTVCDSHGFCDNTAGSFRCLCYQGFQAPQDGQGCVDVNECELLSGVCGEAFCENVEGSFLCVCADENQEYSPMTGQCRSRTSTDLDVDVDQPKEEKKECYYNLNDASLCDNVLAPNVTKQECCCTSGAGWGDNCEIFPCPVLGTAEFTEMCPKGKGFVPAGESSSEAGGENYKDADECLLFGQEICKNGFCLNTRPGYECYCKQGTYYDPVKLQCFDMDECQDPSSCIDGQCVNTEGSYNCFCTHPMVLDASEKRCIRPAESNEQIEETDVYQDLCWEHLSDEYVCSRPLVGKQTTYTECCCLYGEAWGMQCALCPLKDSDDYAQLCNIPVTGRRQPYGRDALVDFSEQYTPEADPYFIQDRFLNSFEELQAEECGILNGCENGRCVRVQEGYTCDCLDGYHLDTAKMTCFDVNECDELNNRMSLCKNAKCINTDGSYKCLCLPGYVPSDKPNYCTPLNTALNLEKDSDLE

SEQ ID NO: 83 - protein, 461 aa, Homo sapiens
MQRVNMIMAESPGLITICLLGYLLSAECTVFLDHENANKILNRPKRYNSGKLEEFVQGNLERECMEEKCSFEEAREVFENTERTTEFWKQYVDGDQCESNPCLNGGSCKDDINSYECWCPFGFEGKNCELDVTCNIKNGRCEQFCKNSADNKVVCSCTEGYRLAENQKSCEPAVPFPCGRVSVSQTSKLTRAETVFPDVDYVNSTEAETILDNITQSTQSFNDFTRVVGGEDAKPGQFPWQVVLNGKVDAFCGGSIVNEKWIVTAAHCVETGVKITVVAGEHNIEETEHTEQKRNVIRIIPHHNYNAAINKYNHDIALLELDEPLVLNSYVTPICIADKEYTNIFLKFGSGYVSGWGRVFHKGRSALVLQYLRVPLVDRATCLRSTKFTIYNNMFCAGFHEGGRDSCQGDSGGPHVTEVEGTSFLTGIISWGEECAMKGKYGIYTKVSRYVNWIKEKTKLT

SEQ ID NO: 84 - protein, 655 aa, Homo sapiens
MGRWAWVPSPWPPPGLGPFLLLLLLLLLLPRGFQPQPGGNRTESPEPNATATPAIPTILVTSVTSETPATSAPEAEGPQSGGLPPPPRAVPSSSSPQAQALTEDGRPCRFPFRYGGRMLHACTSEGSAHRKWCATTHNYDRDRAWGYCVEATPPPGGPAALDPCASGPCLNGGSCSNTQDPQSYHCSCPRAFTGKDCGTEKCFDETRYEYLEGGDRWARVRQGHVEQCECFGGRTWCEGTRHTACLSSPCLNGGTCHLIVATGTTVCACPPGFAGRLCNIEPDERCFLGNGTGYRGVASTSASGLSCLAWNSDLLYQELHVDSVGAAALLGLGPHAYCRNPDNDERPWCYVVKDSALSWEYCRLEACESLTRVQLSPDLLATLPEPASPGRQACGRRHKKRTFLRPRIIGGSSSLPGSHPWLAAIYIGDSFCAGSLVHTCWVVSAAHCFSHSPPRDSVSVVLGQHFFNRTTDVTQTFGIEKYIPYTLYSVFNPSDHDLVLIRLKKKGDRCATRSQFVQPICLPEPGSTFPAGHKCQIAGWGHLDENVSGYSSSLREALVPLVADHKCSSPEVYGADISPNMLCAGYFDCKSDACQGDSGGPLACEKNGVAYLYGIISWGDGCGRLHKPGVYTRVANYVDWINDRIRPPRRLVAPS

SEQ ID NO: 85 - protein, 245 aa, Homo sapiens
MDVGPSSLPHLGLKLLLLLLLLPLRGQANTGCYGIPGMPGLPGAPGKDGYDGLPGPKGEPGIPAIPGIRGPKGQKGEPGLPGHPGKNGPMGPPGMPGVPGPMGIPGEPGEEGRYKQKFQSVFTVTRQTHQPPAPNSLIRFNAVLTNPQGDYDTSTGKFTCKVPGLYYFVYHASHTANLCVLLYRSGVKVVTFCGHTSKTNQVNSGGVLLRLQVGEEVWLAVNDYYDMVGIQGSDSVFSGFLLFPD

SEQ ID NO: 86 - protein, 251 aa, Homo sapiens
MKIPWGSIPVLMLLLLLGLIDISQAQLSCTGPPAIPGIPGIPGTPGPDGQPGTPGIKGEKGLPGLAGDHGEFGEKGDPGIPGNPGKVGPKGPMGPKGGPGAPGAPGPKGESGDYKATQKIAFSATRTINVPLRRDQTIRFDHVITNMNNNYEPRSGKFTCKVPGLYYFTYHASSRGNLCVNLMRGRERAQKVVTFCDYAYNTFQVTTGGMVLKLEQGENVFLQATDKNSLLGMEGANSIFSGFLLFPDMEA

SEQ ID NO: 87 - protein, 757 aa, Homo sapiens
MVPDTACVLLLTLAALGASGQGQSPLGSDLGPQMLRELQETNAALQDVRELLRQQVREITFLKNTVMECDACGMQQSVRTGLPSVRPLLHCAPGFCFPGVACIQTESGARCGPCPAGFTGNGSHCTDVNECNAHPCFPRVRCINTSPGFRCEACPPGYSGPTHQGVGLAFAKANKQVCTDINECETGQHNCVPNSVCINTRGSFQCGPCQPGFVGDQASGCQRRAQRFCPDGSPSECHEHADCVLERDGSRSCVCAVGWAGNGILCGRDTDLDGFPDEKLRCPERQCRKDNCVTVPNSGQEDVDRDGIGDACDPDADGDGVPNEKDNCPLVRNPDQRNTDEDKWGDACDNCRSQKNDDQKDTDQDGRGDACDDDIDGDRIRNQADNCPRVPNSDQKDSDGDGIGDACDNCPQKSNPDQADVDHDFVGDACDSDQDQDGDGHQDSRDNCPTVPNSAQEDSDHDGQGDACDDDDDNDGVPDSRDNCRLVPNPGQEDADRDGVGDVCQDDFDADKVVDKIDVCPENAEVTLTDFRAFQTVVLDPEGDAQIDPNWVVLNQGREIVQTMNSDPGLAVGYTAFNGVDFEGTFHVNTVTDDDYAGFIFGYQDSSSFYVVMWKQMEQTYWQANPFRAVAEPGIQLKAVKSSTGPGEQLRNALWHTGDTESQVRLLWKDPRNVGWKDKKSYRWFLQHRPQVGYIRVRFYEGPELVADSNVVLDTTMRGGRLGVFCFSQENIIWANLRYRCNDTIPEDYETHQLRQA

SEQ ID NO: 88 - protein, 376 aa, Homo sapiens
MCEEETTALVCDNGSGLCKAGFAGDDAPRAVFPSIVGRPRHQGVMVGMGQKDSYVGDEAQSKRGILTLKYPIEHGIITNWDDMEKIWHHSFYNELRVAPEEHPTLLTEAPLNPKANREKMTQIMFETFNVPAMYVAIQAVLSLYASGRTTGIVLDSGDGVTHNVPIYEGYALPHAIMRLDLAGRDLTDYLMKILTERGYSFVTTAEREIVRDIKEKLCYVALDFENEMATAASSSSLEKSYELPDGQVITIGNERFRCPETLFQPSFIGMESAGIHETTYNSIMKCDIDIRKDLYANNVLSGGTTMYPGIADRMQKEITALAPSTMKIKIIAPPERKYSVWIGGSILASLSTFQQMWISKPEYDEAGPSIVHRKCF

SEQ ID NO: 89 - protein, 976 aa, Homo sapiens [sequence omitted]

SEQ ID NO: 90 - protein, 560 aa, Homo sapiens
MLRGTLLCAVLGLLRAQPFPCPPACKCVFRDAAQCSGGDVARISALGLPTNLTHILLFGMGRGVLQSQSFSGMTVLQRLMISDSHISAVAPGTFSDLIKLKTLRLSRNKITHLPGALLDKMVLLEQLFLDHNALRGIDQNMFQKLVNLQELALNQNQLDFLPASLFTNLENLKLLDLSGNNLTHLPKGLLGAQAKLERLLLHSNRLVSLDSGLLNSLGALTELQFHRNHIRSIAPGAFDRLPNLSSLTLSRNHLAFLPSALFLHSHNLTLLTLFENPLAELPGVLFGEMGGLQELWLNRTQLRTLPAAAFRNLSRLRYLGVTLSPRLSALPQGAFQGLGELQVLALHSNGLTALPDGLLRGLGKLRQVSLRRNRLRALPRALFRNLSSLESVQLDHNQLETLPGDVFGALPRLTEVLLGHNSWRCDCGLGPFLGWLRQHLGLVGGEEPPRCAGPGAHAGLPLWALPGGDAECPGPRGPPPRPAADSSSEAPVHPALAPNSSEPWVWAQPVTTGKGQDHSPFWGFYFLLLAVQAMITVIIVFAMIKIGQLFRKLIRERALG

SEQ ID NO: 91 - protein, 1007 aa, Homo sapiens
MGSGGDSLLGGRGSLPLLLLLIMGGMAQDSPPQILVHPQDQLFQGPGPARMSCQASGQPPPTIRWLLNGQPLSMVPPDPHHLLPDGTLLLLQPPARGHAHDGQALSTDLGVYTCEASNRLGTAVSRGARLSVAVLREDFQIQPRDMVAVVGEQFTLECGPPWGHPEPTVSWWKDGKPLALQPGRHTVSGGSLLMARAEKSDEGTYMCVATNSAGHRESRAARVSIQEPQDYTEPVELLAVRIQLENVTLLNPDPAEGPKPRPAVWLSWKVSGPAAPAQSYTALFRTQTAPGGQGAPWAEELLAGWQSAELGGLHWGQDYEFKVRPSSGRARGPDSNVLLLRLPEKVPSAPPQEVTLKPGNGTVFVSWVPPPAENHNGIIRGYQVWSLGNTSLPPANWTVVGEQTQLEIATHMPGSYCVQVAAVTGAGAGEPSRPVCLLLEQAMERATQEPSEHGPWTLEQLRATLKRPEVIATCGVALWLLLLGTAVCIHRRRRARVHLGPGLYRYTSEDAILKHRMDHSDSQWLADTWRSTSGSRDLSSSSSLSSRLGADARDPLDCRRSLLSWDSRSPGVPLLPDTSTFYGSLIAELPSSTPARPSPQVPAVRRLPPQLAQLSSPCSSSDSLCSRRGLSSPRLSLAPAEAWKAKKKQELQHANSSPLLRGSHSLELRACELGNRGSKNLSQSPGAVPQALVAWRALGPKLLSSSNELVTRHLPPAPLFPHETPPTQSQQTQPPVAPQAPSSILLPAAPIPILSPCSPPSPQASSLSGPSPASSRLSSSSLSSLGEDQDSVLTPEEVALCLELSEGEETPRNSVSPMPRAPSPPTTYGYISVPTASEFTDMGRTGGGVGPKGGVLLCPPRPCLTPTPSEGSLANGWGSASEDNAASARASLVSSSDGSFLADAHFARALAVAVDSFGFGLEPREADCVFIDASSPPSPRDEIFLTPNLSLPLWEWRPDWLEDMEVSHTQRLGRGMPPWPPDSQISSQRSQLHCRMPKAGASPVDYS

SEQ ID NO: 92 - protein, 540 aa, Homo sapiens
MGTTARAALVLTYLAVASAASEGGFTATGQRQLRPEHFQEVGYAAPPSPPLSRSLPMDHPDSSQHGPPFEGQSQVQPPPSQEATPLQQEKLLPAQLPAEKEVGPPLPQEAVPLQKELPSLQHPNEQKEGTPAPFGDQSHPEPESWNAAQHCQQDRSQGGWGHRLDGFPPGRPSPDNLNQICLPNRQHVVYGPWNLPQSSYSHLTRQGETLNFLEIGYSRCCHCRSHTNRLECAKLVWEEAMSRFCEAEFSVKTRPHWCCTRQGEARFSCFQEEAPQPHYQLRACPSHQPDISSGLELPFPPGVPTLDNIKNICHLRRFRSVPRNLPATDPLQRELLALIQLEREFQRCCRQGNNHTCTWKAWEDTLDKYCDREYAVKTHHHLCCRHPPSPTRDECFARRAPYPNYDRDILTIDIGRVTPNLMGHLCGNQRVLTKHKHIPGLIHNMTARCCDLPFPEQACCAEEEKLTFINDLCGPRRNIWRDPALCCYLSPGDEQVNCFNINYLRNVALVSGDTENAKGQGEQGSTGGTNISSTSEPKEE

SEQ ID NO: 93 - protein, 245 aa, Homo sapiens
MEGPRGWLVLCVLAISLASMVTEDLCRAPDGKKGEAGRPGRRGRPGLKGEQGEPGAPGIRTGIQGLKGDQGEPGPSGNPGKVGYPGPSGPLGARGIPGIKGTKGSPGNIKDQPRPAFSAIRRNPPMGGNVVIFDTVITNQEEPYQNHSGRFVCTVPGYYYFTFQVLSQWEICLSIVSSSRGQVRRSLGFCDTTNKGLFQVVSGGMVLQLQQGDQVWVEKDPKKGHIYQGSEADSVFSGFLIFPSA

SEQ ID NO: 94 - protein, 493 aa, Homo sapiens
MALFGALFLALLAGAHAEFPGCKIRVTSKALELVKQEGLRFLEQELETITIPDLRGKEGHFYYNISEVKVTELQLTSSELDFQPQQELMLQITNASLGLRFRRQLLYWFFYDGGYINASAEGVSIRTGLELSRDPAGRMKVSNVSCQASVSRMHAAFGGTFKKVYDFLSTFITSGMRFLLNQQICPVLYHAGTVLLNSLLDTVPVRSSVDELVGIDYSLMKDPVASTSNLDMDFRGAFFPLTERNWSLPNRAVEPQLQEEERMVYVAFSEFFFDSAMESYFRAGALQLLLVGDKVPHDLDMLLRATYFGSIVLLSPAVIDSPLKLELRVLAPPRCTIKPSGTTISVTASVTIALVPPDQPEVQLSSMTMDARLSAKMALRGKALRTQLDLRRFRIYSNHSALESLALIPLQAPLKTMLQIGVMPMLNERTWRGVQIPLPEGINFVHEVVTNHAGFLTIGADLHFAKGLREVIEKNRPADVRASTAPTPSTAAV

SEQ ID NO: 95 - protein, 1427 aa, Homo sapiens
MHQRHPRARCPPLCVAGILACGFLLGCWGPSHFQQSCLQALEPQAVSSYLSPGAPLKGRPPSPGFQRQRQRQRRAAGGILHLELLVAVGPDVFQAHQEDTERYVLTNLNIGAELLRDPSLGAQFRVHLVKMVILTEPEGAPNITANLTSSLLSVCGWSQTINPEDDTDPGHADLVLYITRFDLELPDGNRQVRGVTQLGGACSPTWSCLITEDTGFDLGVTIAHEIGHSFGLEHDGAPGSGCGPSGHVMASDGAAPRAGLAWSPCSRRQLLSLLSAGRARCVWDPPRPQPGSAGHPPDAQPGLYYSANEQCRVAFGPKAVACTFAREHLDMCQALSCHTDPLDQSSCSRLLVPLLDGTECGVEKWCSKGRCRSLVELTPIAAVHGRWSSWGPRSPCSRSCGGGVVTRRRQCNNPRPAFGGRACVGADLQAEMCNTQACEKTQLEFMSQQCARTDGQPLRSSPGGASFYHWGAAVPHSQGDALCRHMCRAIGESFIMKRGDSFLDGTRCMPSGPREDGTLSLCVSGSCRTFGCDGRMDSQQVWDRCQVCGGDNSTCSPRKGSFTAGRAREYVTFLTVTPNLTSVYIANHRPLFTHLAVRIGGRYVVAGKMSISPNTTYPSLLEDGRVEYRVALTEDRLPRLEEIRIWGPLQEDADIQVYRRYGEEYGNLTRPDITFTYFQPKPRQAWVWAAVRGPCSVSCGAGLRWVNYSCLDQARKELVETVQCQGSQQPPAWPEACVLEPCPPYWAVGDFGPCSASCGGGLRERPVRCVEAQGSLLKTLPPARCRAGAQQPAVALETCNPQPCPARWEVSEPSSCTSAGGAGLALENETCVPGADGLEAPVTEGPGSVDEKLPAPEPCVGMSCPPGWGHLDATSAGEKAPSPWGSIRTGAQAAHVWTPAAGSCSVSCGRGLMELRFLCMDSALRVPVQEELCGLASKPGSRREVCQAVPCPARWQYKLAACSVSCGRGVVRRILYCARAHGEDDGEEILLDTQCQGLPRPEPQEACSLEPCPPRWKVMSLGPCSASCGLGTARRSVACVQLDQGQDVEVDEAACAALVRPEASVPCLIADCTYRWHVGTWMECSVSCGDGIQRRRDTCLGPQAQAPVPADFCQHLPKPVTVRGCWAGPCVGQGTPSLVPHEEAAAPGRTTATPAGASLEWSQARGLLFSPAPQPRRLLPGPQENSVQSSACGRQHLEPTGTIDMRGPGQADCAVAIGRPLGEVVTLRVLESSLNCSAGDMLLLWGRLTWRKMCRKLLDMTFSSKTNTLVVRQRCGRPGGGVLLRYGSQLAPETFYRECDMQLFGPWGEIVSPSLSPATSNAGGCRLFINVAPHARIAIHALATNMGAGTEGANASYILIRDTHSLRTTAFHGQQVLYWESESSQAEMEFSEGFLKAQASLRGQYWTLQSWVPEMQDPQSWKGKEGT

SEQ ID NO: 96 - protein, 500 aa, Homo sapiens
MASRLTLLTLLLLLLAGDRASSNPNATSSSSQDPESLQDRGEGKVATTVISKMLFVEPILEVSSLPTTNSTTNSATKITANTTDEPTTQPTTEPTTQPTIQPTQPTTQLPTDSPTQPTTGSFCPGPVTLCSDLESHSTEAVLGDALVDFSLKLYHAFSAMKKVETNMAFSPFSIASLLTQVLLGAGENTKTNLESILSYPKDFTCVHQALKGFTTKGVTSVSQIFHSPDLAIRDTFVNASRTLYSSSPRVLSNNSDANLELINTWVAKNTNNKISRLLDSLPSDTRLVLLNAIYLSAKWKTTFDPKKTRMEPFHFKNSVIKVPMMNSKKYPVAHFIDQTLKAKVGQLQLSHNLSLVILVPQNLKHRLEDMEQALSPSVFKAIMEKLEMSKFQPTLLTLPRIKVTTSQDMLSIMEKLEFFDFSYDLNLCGLTEDPDLQVSAMQHQTVLELTETGVEAAAASAISVARTLLVFEVQQPFLFVLWDQQHKFPVFMGRVYDPRA

SEQ ID NO: 97 - protein, 308 aa, Homo sapiens [sequence omitted]

SEQ ID NO: 98 - protein, 485 aa, Homo sapiens
MSVPLLKIGVVLSTMAMITNWMSQTLPSLVGLNTTKLSAAGGGTLDRSTGVLPTNPEESWQVYSSAQDSEGRCICTVVAPQQTMCSRDARTKQLRQLLEKVQNMSQSIEVLDRRTQRDLQYVEKMENQMKGLESKFKQVEESHKQHLARQFKAIKAKMDELRPLIPVLEEYKADAKLVLQFKEEVQNLTSVLNELQEEIGAYDYDELQSRVSNLEERLRACMQKLACGKLTGISDPVTVKTSGSRFGSWMTDPLAPEGDNRVWYMDGYHNNRFVREYKSMVDFMNTDNFTSHRLPHPWSGTGQVVYNGSIYFNKFQSHIIIRFDLKTETILKTRSLDYAGYNNMYHYAWGGHSDIDLMVDESGLWAVYATNQNAGNIVVSRLDPVSLQTLQTWNTSYPKRSAGEAFIICGTLYVTNGYSGGTKVHYAYQTNASTYEYIDIPFQNKYSHISMLDYNPKDRALYAWNNGHQILYNVTLFHVIRSDEL

SEQ ID NO: 99 - protein, 233 aa, Homo sapiens
MWQLLLPTALLLLVSAGMRTEDLPKAVVFLEPQWYSVLEKDSVTLKCQGAYSPEDNSTQWFHNESLISSQASSYFIDAATVNDSGEYRCQTNLSTLSDPVQLEVHIGWLLLQAPRWVFKEEDPIHLRCHSWKNTALHKVTYLQNGKDRKYFHHNSDFHIPKATLKDSGSYFCRGLVGSKNVSSETVNITITQGLAVSTISSFSPPGYQVSFCLVMVLLFAVDTGLYFSVKTNI

SEQ ID NO: 100 - protein, 742 aa, Homo sapiens [sequence omitted]

SEQ ID NO: 101 - protein, 1456 aa, Homo sapiens [sequence omitted]

SEQ ID NO: 102 - protein, 491 aa, Homo sapiens
MKRMVSWSFHKLKTMKHLLLLLLCVFLVKSQGVNDNEEGFFSARGHRPLDKKREEAPSLRPAPPPISGGGYRARPAKAAATQKKVERKAPDAGGCLHADPDLGVLCPTGCQLQEALLQQERPIRNSVDELNNNVEAVSQTSSSSFQYMYLLKDLWQKRQKQVKDNENVVNEYSSELEKHQLYIDETVNSNIPTNLRVLRSILENLRSKIQKLESDVSAQMEYCRTPCTVSCNIPVVSGKECEEIIRKGGETSEMYLIQPDSSVKPYRVYCDMNTENGGWTVIQNRQDGSVDFGRKWDPYKQGFGNVATNTDGKNYCGLPGEYWLGNDKISQLTRMGPTELLIEMEDWKGDKVKAHYGGFTVQNEANKYQISVNKYRGTAGNALMDGASQLMGENRTMTIHNGMFFSTYDRDNDGWLTSDPRKQCSKEDGGGWWYNRCHAANPNGRYYWGGQYTWDMAKHGTDDGVVWMNWKGSWYSMRKMSMKIRPFFPQQ

SEQ ID NO: 103 - protein, 763 aa, Homo Sapiens; identical to SEQ ID NO: 66

SEQ ID NO: 104 - protein, 201 aa, Homo Sapiens
MALSWVLTVLSLLPLLEAQIPLCANLVPVPITNATLDQITGKWFYIASAFRNEEYNKSVQEIQATFFYFTPNKTEDTIFLREYQTRQDQCIYNTTYLNVQRENGTISRYVGGQEHFAHLLILRDTKTYMLAFDVNDEKNWGLSVYADKPETTKEQLGEFYEALDCLRIPKSDVVYTDWKKDKCEPLEKQHEKERKQEEGES

SEQ ID NO: 105 - protein, 784 aa, Homo Sapiens
MQRLMMLLATSGACLGLLAVAAVAAAGANPAQRDTHSLLPTHRRQKRDWIWNQMHIDEEKNTSLPHHVGKIKSSVSRKNAKYLLKGEYVGKVFRVDAETGDVFAIERLDRENISEYHLTAVIVDKDTGENLETPSSFTIKVHDVNDNWPVFTHRLFNASVPESSAVGTSVISVTAVDADDPTVGDHASVMYQILKGKEYFAIDNSGRIITITKSLDREKQARYEIVVEARDAQGLRGDSGTATVLVTLQDINDNFPFFTQTKYTFVVPEDTRVGTSVGSLFVEDPDEPQNRMTKYSILRGDYQDAFTIETNPAHNEGIIKPMKPLDYEYIQQYSFIVEATDPTIDLRYMSPPAGNRAQVIINITDVDEPPIFQQPFYHFQLKENQKKPLIGTVLAMDPDAARHSIGYSIRRTSDKGQFFRVTKKGDIYNEKELDREVYPWYNLTVEAKELDSTGTPTGKESIVQVHIEVLDENDNAPEFAKPYQPKVCENAVHGQLVLQISAIDKDITPRNVKFKFTLNTENNFTLTDNHDNTANITVKYGQFDREHTKVHFLPVVISDNGMPSRTGTSTLTVAVCKCNEQGEFTFCEDMAAQVGVSIQAVVAILLCILTITVITLLIFLRRRLRKQARAHGKSVPEIHEQLVTYDEEGGGEMDTTSYDVSVLNSVRRGGAKPPRPALDARPSLYAQVQKPPRHAPGAHGGPGEMAAMIEVKKDEADHDGDGPPYDTLHIYGYEGSESIAESLSSLGTDSSDSDVDYDFLNDWGPRFKMLAELYGSDPREELLY

SEQ ID NO: 106 - protein, 364 aa, Homo Sapiens
MPYQYPALTPEQKKELSDIAHRIVAPGKGILAADESTGSIAKRLQSIGTENTEENRRFYRQLLLTADDRVNPCIGGVILFHETLYQKADDGRPFPQVIKSKGGVVGIKVDKGVVPLAGTNGETTTQGLDGLSERCAQYKKDGADFAKWRCVLKIGEHTPSALAIMENANVLARYASICQQNGIVPIVEPEILPDGDHDLKRCQYVTEKVLAAVYKALSDHHIYLEGTLLKPNMVTPGHACTQKFSHEEIAMATVTALRRTVPPAVTGITFLSGGQSEEEASINLNAINKCPLLKPWALTFSYGRALQASALKAWGGKKENLKAAQEEYVKRALANSLACQGKYTPSGQAGAAASESLFVSNHAY

SEQ ID NO: 107 - protein, 1221 aa, Homo Sapiens
MMFRSDRMWSCHWKWKPSPLLFLFALYIMCVPHSVWGCANCRVVLSNPSGTFTSPCYPNDYPNSQACMWTLRAPTGYIIQITFNDFDIEEAPNCIYDSLSLDNGESQTKFCGATAKGLSFNSSANEMHVSFSSDFSIQKKGFNASYIRVAVSLRNQKVILPQTSDAYQVSVAKSISIPELSAFTLCFEATKVGHEDSDWTAFSYSNASFTQLLSFGKAKSGYFLSISDSKCLLNNALPVKEKEDIFAESFEQLCLVWNNSLGSIGVNFKRNYETVPCDSTISKVIPGNGKLLLGSNQNEIVSLKGDIYNFRLWNFTMNAKILSNLSCNVKGNVVDWQNDFWNIPNLALKAESNLSCGSYLIPLPAAELASCADLGTLCQATVNSPSTTPPTVTTNMPVTNRIDKQRNDGIIYRISVVIQNILRHPEVKVQSKVAEWLNSTFQNWNYTVYVVNISFHLSAGEDKIKVKRSLEDEPRLVLWALLVYNATNNTNLEGKIIQQKLLKNNESLDEGLRLHTVNVRQLGHCLAMEEPKGYYWPSIQPSEYVLPCPDKPGFSASRICFYNATNPLVTYWGPVDISNCLKEANEVANQILNLTADGQNLTSANITNIVEQVKRIVNKEENIDITLGSTLMNIFSNILSSSDSDLLESSSEALKTIDELAFKIDLNSTSHVNITTRNLALSVSSLLPGTNAISNFSIGLPSNNESYFQMDFESGQVDPLASVILPPNLLENLSPEDSVLVRRAQFTFFNKTGLFQDVGPQRKTLVSYVMACSIGNITIQNLKDPVQIKIKHTRTQEVHHPICAFWDLNKNKSFGGWNTSGCVAHRDSDASETVCLCNHFTHFGVLMDLPRSASQLDARNTKVLTFISYIGCGISAIFSAATLLTYVAFEKLRRDYPSKILMNLSTALLFLNLLFLLDGWITSFNVDGLCIAVAVLLHFFLLATFTWMGLEAIHMYIALVKVFNTYIRRYILKFCIIGWGLPALVVSVVLASRNNNEVYGKESYGKEKGDEFCWIQDPVIFYVTCAGYFGVMFFLNIAMFIVVMVQICGRNGKRSNRTLREEVLRNLRSVVSLTFLLGMTWGFAFFAWGPLNIPFMYLFSIFNSLQGLFIFIFHCAMKENVQKQWRQHLCCGRFRLADNSDWSKTATNIIKKSSDNLGKSLSSSSIGSNSTYLTSKSKSSSTTYFKRNSHTDNVSYEHSFNKSGSLRQCFHGQVLVKTGPC

SEQ ID NO: 108 - protein, 245 aa, Homo sapiens
MDKNELVQKAKLAEQAERYDDMAACMKSVTEQGAELSNEERNLLSVAYKNVVGARRSSWRVVSSIEQKTEGAEKKQQMAREYREKIETELRDICNDVLSLLEKFLIPNASQAESKVFYLKMKGDYYRYLAEVAAGDDKKGIVDQSQQAYQEAFEISKKEMQPTHPIRLGLALNFSVFYYEILNSPEKACSLAKTAFDEAIAELDTLSEESYKDSTLIMQLLRDNLTLWTSDTQGDEAEAGEGGEN

SEQ ID NO: 109 - protein, 166 aa, Homo Sapiens
MASGVAVSDGVIKVFNDMKVRKSSTPEEVKKRKKAVLFCLSEDKKNIILEEGKEILVGDVGQTVDDPYATFVKMLPDKDCRYALYDATYETKESKKEDLVFIFWAPESAPLKSKMIYASSKDAIKKKLTGIKHELQANCYEEVKDRCTLAEKLGGSAVISLEGKPL

SEQ ID NO: 110 - protein, 335 aa, Homo Sapiens
MGKVKVGVNGFGRIGRLVTRAAFNSGKVDIVAINDPFIDLNYMVYMFQYDSTHGKFHGTVKAENGKLVINGNPITIFQERDPSKIKWGDAGAEYVVESTGVFTTMEKAGAHLQGGAKRVIISAPSADAPMFVMGVNHEKYDNSLKIISNASCTTNCLAPLAKVIHDNFGIVEGLMTTVHAITATQKTVDGPSGKLWRDGRGALQNIIPASTGAAKAVGKVIPELNGKLTGMAFRVPTANVSVVDLTCRLEKPAKYDDIKKVVKQASEGPLKGILGYTEHQVVSSDFNSDTHSSTFDAGAGIALNDHFVKLISWYDNEFGYSNRVVDLMAHMASKE

SEQ ID NO: 111 - protein, 300 aa, Homo Sapiens
MAAGLARLLLLLGLSAGGPAPAGAAKMKVVEEPNAFGVNNPFLPQASRLQAKRDPSPVSGPVHLFRLSGKCFSLVESTYKYEFCPFHNVTQHEQTFRWNAYSGILGIWHEWEIANNTFTGMWMRDGDACRSRSRQSKVELACGKSNRLAHVSEPSTCVYALTFETPLVCHPHALLVYPTLPEALQRQWDQVEQDLADELITPQGHEKLLRTLFEDAGYLKTPEENEPTQLEGGPDSLGFETLENCRKAHKELSKEIKRLKGLLTQHGIPYTRPTETSNLEHLGHETPRAKSPEQLRGDPG

SEQ ID NO: 112 - protein, 892 aa, Homo Sapiens
MDHYDSQQTNDYMQPEEDWDRDLLLDPAWEKQQRKTFTAWCNSHLRKAGTQIENIEEDFRDGLKLMLLLEVISGERLAKPERGKMRVHKISNVNKALDFIASKGVKLVSIGAEEIVDGNVKMTLGMIWTIILRFAIQDISVEETSAKEGLLLWCQRKTAPYKNVNIQNFHISWKDGLGFCALIHRHRPELIDYGKLRKDDPLTNLNTAFDVAEKYLDIPKMLDAEDIVGTARPDEKAIMTYVSSFYHAFSGAQKAETAANRICKVLAVNQENEQLMEDYEKLASDLLEWIRRTIPWLENRVPENTMHAMQQKLEDFRDYRRLHKPPKVQEKCQLEINFNTLQTKLRLSNRPAFMPSEGRMVSDINNAWGCLEQVEKGYEEWLLNEIRRLERLDHLAEKFRQKASIHEAWTDGKEAMLRQKDYETATLSEIKALLKKHEAFESDLAAHQDRVEQIAAIAQELNELDYYDSPSVNARCQKICDQWDNLGALTQKRREALERTEKLLETIDQLYLEYAKRAAPFNNWMEGAMEDLQDTFIVHTIEEIQGLTTAHEQFKATLPDADKERLAILGIHNEVSKIVQTYHVNMAGTNPYTTITPQEINGKWDHVRQLVPRRDQALTEEHARQQHNERLRKQFGAQANVIGPWIQTKMEEIGRISIEMHGTLEDQLSHLRQYEKSIVNYKPKIDQLEGDHQLIQEALIFDNKHTNYTMEHIRVGWEQLLTTIARTINEVENQILTRDAKGISQEQMNEFRASFNHFDRDHSGTLGPEEFKACLISLGYDIGNDPQGEAEFARIMSIVDPNRLGVVTFQAFIDFMSRETADTDTADQVMASFKILAGDKNYITMDELRRELPPDQAEYCIARMAPYTGPDSVPGALDYMSFSTALYGESDL

SEQ ID NO: 113 - protein, 254 aa, Homo Sapiens
MAAYKLVLIRHGESAWNLENRFSGWYDADLSPAGHEEAKRGGQALRDAGYEFDICFTSVQKRAIRTLWTVLDAIDQMWLPVVRTWRLNERHYGGLTGLNKAETAAKHGEAQVKIWRRSYDVPPPPMEPDHPFYSNISKDRRYADLTEDQLPSCESLKDTIARALPFWNEEIVPQIKEGKRVLIAAHGNSLRGIVKHLEGLSEEAIMELNLPTGIPIVYELDKNLKPIKPMQFLGDEETVRKAMEAVAAQGKAKK

SEQ ID NO: 114 - protein, 311 aa, Homo Sapiens
MGLTLLLLLLLGLEGQGIVGSLPEVLQAPVGSSILVQCHYRLQDVKAQKVWCRFLPEGCQPLVSSAVDRRAPAGRRTFLTDLGGGLLQVEMVTLQEEDAGEYGCMVDGARGPQILHRVSLNILPPEEEEETHKIGSLAENAFSDPAGSANPLEPSQDEKSIPLIWGAVLLVGLLVAAVVLFAVMAKRKQGNRLGVCGRFLSSRVSGMNPSSVVHHVSDSGPAAELPLDVPHIRLDSPPSFDNTTYTSLPLDSPSGKPSLPAPSSLPPLPPKVLVCSKPVTYATVIFPGGNKGGGTSCGPAQNPPNNQTPSS

SEQ ID NO: 115 - protein, 210 aa, Homo Sapiens
MPPYTVVYFPVRGRCAALRMLLADQGQSWKEEVVTVETWQEGSLKASCLYGQLPKFQDGDLTLYQSNTILRHLGRTLGLYGKDQQEAALVDMVNDGVEDLRCKYISLIYTNYEAGKDDYVKALPGQLKPFETLLSQNQGGKTFIVGDQISFADYNLLDLLLIHEVLAPGCLDAFPLLSAYVGRLSARPKLKAFLASPEYVNLPINGNGKQ

SEQ ID NO: 116 - protein, 1025 aa, Homo sapiens
MEPFTNDRLQLPRNMIENSMFEEEPDVVDLAKEPCLHPLEPDEVEYEPRGSRLLVRGLGEHEMEEDEEDYESSAKLLGMSFMNRSSGLRNSATGYRQSPDGACSVPSARTMVVCAFVIVVAVSVIMVIYLLPRCTFTKEGCHKKNQSIGLIQPFATNGKLFPWAQIRLPTAVVPLRYELSLHPNLTSMTFRGSVTISVQALQVTWNIILHSTGHNISRVTFMSAVSSQEKQAEILEYAYHGQIAIVAPEALLAGHNYTLKIEYSANISSSYYGFYGFSYTDESNEKKYFAATQFEPLAARSAFPCFDEPAFKATFIIKIIRDEQYTALSNMPKKSSVVLDDGLVQDEFSESVKMSTYLVAFIVGEMKNLSQDVNGTLVSIYAVPEKIGQVHYALETTVKLLEFFQNYFEIQYPLKKLDLVAIPDFEAGAMENWGLLTFREETLLYDSNTSSMADRKLVTKIIAHELAHQWFGNLVTMKWWNDLWLNEGFATFMEYFSLEKIFKELSSYEDFLDARFKTMKKDSLNSSHPISSSVQSSEQIEEMFDSLSYFKGSSLLLMLKTYLSEDVFQHAVVLYLHNHSYASIQSDDLWDSFNEVTNQTLDVKRMMKTWTLQKGFPLVTVQKKGKELFIQQERFFLNMKPEIQPSDTSYLWHIPLSYVTEGRNYSKYQSVSLLDKKSGVINLTEEVLWVKVNINMNGYYIVHYADDDWEALIHQLKINPYVLSDKDRANLINNIFELAGLGKVPLKRAFDLINYLGNENHTAPITEALFQTDLIYNLLEKLGYMDLASRLVTRVFKLLQNQIQQQTWTDEGTPSMRELRSALLEFACTHNLGNCSTTAMKLFDDWMASNGTQSLPTDVMTTVFKVGAKTDKGWSFLLGKYISIGSEAEKNKILEALASSEDVRKLYWLMKSSLNGDNFRTQKLSFIIRTVGRHFPGHLLAWDFVKENWNKLVQKFPLGSYTIQNIVAGSTYLFSTKTHLSEVQAFFENQSEATFRLRCVQEALEVIQLNIQWMEKNLKSLTWWL

SEQ ID NO: 117 - protein, 475 aa, Homo Sapiens
MADMQNLVERLERAVGRLEAVSHTSDMHRGYADSPSKAGAAPYVQAFDSLLAGPVAEYLKISKEIGGDVQKHAEMVHTGLKLERALLVTASQCQQPAENKLSDLLAPISEQIKEVITFREKNRGSKLFNHLSAVSESIQALGWVAMAPKPGPYVKEMNDAAMFYTNRVLKEYKDVDKKHVDWVKAYLSIWTELQAYIKEFHTTGLAWSKTGPVAKELSGLPSGPSAGSGPPPPPPCPPPPPVSTISCSYESASRSSLFAQINQGESITHALKHVSDDMKTHKNPALKAQSGPVRSGPKPFSAPKPQTSPSPKRATKKEPAVLELEGKKWRVENQENVSNLVIEDTELKQVAYIYKCVNTTLQIKGKINSITVDNCKKLGLVFDDVVGIVEIINSKDVKVQVMGKVPTISINKTDGCHAYLSKNSLDCEIVSAKSSEMNVLIPTEGGDFNEFPVPEQFKTLWNGQKLVTTVTEIAG

SEQ ID NO: 118 - protein, 165 aa, Homo Sapiens
MVNPTVFFDIAVDGEPLGRVSFELFADKVPKTAENFRALSTGEKGFGYKGSCFHRIIPGFMCQGGDFTRHNGTGGKSIYGEKFEDENFILKHTGPGILSMANAGPNTNGSQFFICTAKTEWLDGKHVVFGKVKEGMNIVEAMERFGSRNGKTSKKITIADCGQLE

SEQ ID NO: 119 - protein, 623 aa, Homo Sapiens
MESYHKPDQQKLQALKDTANRLRISSIQATTAAGSGHPTSCCSAAEIMAVLFFHTMRYKSQDPRNPHNDRFVLSKGHAAPILYAVWAEAGFLAEAELLNLRKISSDLDGHPVPKQAFTDVATGSLGQGLGAACGMAYTGKYFDKASYRVYCLLGDGELSEGSVWEAMAFASIYKLDNLVAILDINRLGQSDPAPLQHQMDIYQKRCEAFGWHAIIVDGHSVEELCKAFGQAKHQPTAIIAKTFKGRGITGVEDKESWHGKPLPKNMAEQIIQEIYSQIQSKKKILATPPQEDAPSVDIANIRMPSLPSYKVGDKIATRKAYGQALAKLGHASDRIIALDGDTKNSTFSEIFKKEHPDRFIECYIAEQNMVSIAVGCATRNRTVPFCSTFAAFFTRAFDQIRMAAISESNINLCGSHCGVSIGEDGPSQMALEDLAMFRSVPTSTVFYPSDGVATEKAVELAANTKGICFIRTSRPENAIIYNNNEDFQVGQAKVVLKSKDDQVTVIGAGVTLHEALAAAELLKKEKINIRVLDPFTIKPLDRKLILDSARATKGRILTVEDHYYEGGIGEAVSSAVVGEPGITVTHLAVNRVPRSGKPAELLKMFGIDRDAIAQAVRGLITKA

SEQ ID NO: 120 - protein, 417 aa, Homo Sapiens
MSLSNKLTLDKLDVKGKRVVMRVDFNVPMKNNQITNNQRIKAAVPSIKFCLDNGAKSVVLMSHLGRPDGVPMPDKYSLEPVAVELKSLLGKDVLFLKDCVGPEVEKACANPAAGSVILLENLRFHVEEEGKGKDASGNKVKAEPAKIEAFRASLSKLGDVYVNDAFGTAHRAHSSMVGVNLPQKAGGFLMKKELNYFAKALESPERPFLAILGGAKVADKIQLINNMLDKVNEMIIGGGMAFTFLKVLNNMEIGTSLFDEEGAKIVKDLMSKAEKNGVKITLPVDFVTADKFDENAKTGQATVASGIPAGWMGLDCGPESSKKYAEAVTRAKQIVWNGPVGVFEWEAFARGTKALMDEVVKATSRGCITIIGGGDTATCCAKWNTEDKVSHVSTGGGASLELLEGKVLPGVDALSNI

SEQ ID NO: 121 - protein, 1338 aa, Homo Sapiens
MVSYWDTGVLLCALLSCLLLTGSSSGSKLKDPELSLKGTQHIMQAGQTLHLQCRGEAAHKWSLPEMVSKESERLSITKSACGRNGKQFCSTLTLNTAQANHTGFYSCKYLAVPTSKKKETESAIYIFISDTGRPFVEMYSEIPEIIHMTEGRELVIPCRVTSPNITVTLKKFPLDTLIPDGKRIIWDSRKGFIISNATYKEIGLLTCEATVNGHLYKTNYLTHRQTNTIIDVQISTPRPVKLLRGHTLVLNCTATTPLNTRVQMTWSYPDEKNKRASVRRRIDQSNSHANIFYSVLTIDKMQNKDKGLYTCRVRSGPSFKSVNTSVHIYDKAFITVKHRKQQVLETVAGKRSYRLSMKVKAFPSPEVVWLKDGLPATEKSARYLTRGYSLIIKDVTEEDAGNYTILLSIKQSNVFKNLTATLIVNVKPQIYEKAVSSFPDPALYPLGSRQILTCTAYGIPQPTIKWFWHPCNHNHSEARCDFCSNNEESFILDADSNMGNRIESITQRMAIIEGKNKMASTLVVADSRISGIYICIASNKVGTVGRNISFYITDVPNGFHVNLEKMPTEGEDLKLSCTVNKFLYRDVTWILLRTVNNRTMHYSISKQKMAITKEHSITLNLTIMNVSLQDSGTYACRARNVYTGEEILQKKEITIRDQEAPYLLRNLSDHTVAISSSTTLDCHANGVPEPQITWFKNNHKIQQEPGIILGPGSSTLFIERVTEEDEGVYHCKATNQKGSVESSAYLTVQGTSDKSNLELITLTCTCVAATLFWLLLTLFIRKMKRSSSEIKTDYLSIIMDPDEVPLDEQCERLPYDASKWEFARERLKLGKSLGRGAFGKVVQASAFGIKKSPTCRTVAVKMLKEGATASEYKALMTELKILTHIGHHLNVVNLLGACTKQGGPLMVIVEYCKYGNLSNYLKSKRDLFFLNKDAALHMEPKKEKMEPGLEQGKKPRLDSVTSSESFASSGFQEDKSLSDVEEEEDSDGFYKEPITMEDLISYSFQVARGMEFLSSRKCIHRDLAARNILLSENNVVKICDFGLARDIYKNPDYVRKGDTRLPLKWMAPESIFDKIYSTKSDVWSYGVLLWEIFSLGGSPYPGVQMDEDFCSRLREGMRMRAPEYSTPEIYQIMLDCWHRDPKERPRFAELVEKLGDLLQANVQQDGKDYIPINAILTGNSGFTYSTPAFSEDFFKESISAPKFNSGSSDDVRYVNAFKFMSLERIKTFEELLPNATSMFDDYQGDSSTLLASPMLKRFTWTDSKPKASLKIDLRVTSKSKESGLSDVSRPSFCHSSCGHVSEGKRRFTYDHAELERKIACCSPPPDYNSVVLYSTPPI
